(19) United States
(12) Patent Application Publication
(10) Pub. No.: US 2002/0197669 A1
(43) Pub. Date: Dec. 26, 2002

(54) Compositions and methods for the therapy and diagnosis of lung cancer

(76) Inventors: Chaitanya S. Bangur, Seattle, WA (US); Gary Richard Fanger, Mill Creek, WA (US); Aijun Wang, Issaquah, WA (US); Tongtong Wang, Medina, WA (US); Ann P. Switzer, Seattle, WA (US); Patricia D. McNeill, Federal Way, WA (US); Jonathan D. Clapper, Seattle, WA (US)

Correspondence Address: SEED INTELLECTUAL PROPERTY LAW GROUP PLLC, 701 FIFTH AVE, SUITE 6300, SEATTLE, WA, 98104-7092, US

(21) Appl. No.: 09/849,626

(22) Filed: May 3, 2001

Related U.S. Application Data
(63) Continuation-in-part of application No. 09/736,457, filed on Dec. 13, 2000.

(51) Int. Cl. C07H 21/04; C12Q 1/68; C12N 9/00; C12P 21/02; C12N 5/06

(52) U.S. Cl. 435/69.1; 435/6; 435/183; 435/320.1; 435/325; 536/23.2

(57) ABSTRACT

Compositions and methods for the therapy and diagnosis of cancer, particularly lung cancer, are disclosed. Illustrative compositions comprise one or more lung tumor polypeptides, immunogenic portions thereof, polynucleotides that encode such polypeptides, antigen presenting cell that expresses such polypeptides, and T cells that are specific for cells expressing such polypeptides. The disclosed compositions are useful, for example, in the diagnosis, prevention and/or treatment of diseases, particularly lung cancer.

### CROSS REFERENCE TO RELATED APPLICATIONS

[0001] This application is related to U.S. patent application Ser. No. 09/736,457, filed Dec. 13, 2000; U.S. patent application Ser. No. 09/702,705, filed Oct. 30, 2000; U.S. patent application Ser. No. 09/677,419, filed Oct. 6, 2000; U.S. patent application Ser. No. 09/671,325, filed Sep. 26, 2000; U.S. patent application Ser. No. 09/658,824, filed Sep. 8, 2000; U.S. patent application Ser. No. 09/651,563, filed Aug. 29, 2000; U.S. patent application Ser. No. 09/614,124, filed Jul. 11, 2000; U.S. patent application Ser. No. 09/589,184, filed Jun. 5, 2000; U.S. patent application Ser. No. 09/560,406, filed Apr. 27, 2000; U.S. patent application Ser. No. 09/546,259, filed Apr. 10, 2000; U.S. patent application Ser. No. 09/533,077, filed Mar. 22, 2000; U.S. patent application Ser. No. 09/519,642, filed Mar. 6, 2000; U.S. patent application Ser. No. 09/476,300, filed Dec. 30, 1999; U.S. patent application Ser. No. 09/466,867, filed Dec. 17, 1999; U.S. patent application Ser. No. 09/419,356, filed Oct. 15, 1999; U.S. patent application Ser. No. 09/346,492, filed Jun. 30, 1999; each a CIP of the previous application and all pending.

### TECHNICAL FIELD OF THE INVENTION

[0002] The present invention relates generally to therapy and diagnosis of cancer, such as lung cancer. The invention is more specifically related to polypeptides, comprising at least a portion of a lung tumor protein, and to polynucleotides encoding such polypeptides. Such polypeptides and polynucleotides are useful in pharmaceutical compositions, e.g., vaccines, and other compositions for the diagnosis and treatment of lung cancer.

### BACKGROUND OF THE INVENTION

[0003] Cancer is a significant health problem throughout the world. Although advances have been made in detection and therapy of cancer, no vaccine or other universally successful method for prevention or treatment is currently available. Current therapies, which are generally based on a combination of chemotherapy or surgery and radiation, continue to prove inadequate in many patients.

[0004] Lung cancer is the primary cause of cancer death among both men and women in the U.S., with an estimated 172,000 new cases being reported in 1994. The five-year survival rate among all lung cancer patients, regardless of the stage of disease at diagnosis, is only 13%. This contrasts with a five-year survival rate of 46% among cases detected while the disease is still localized. However, only 16% of lung cancers are discovered before the disease has spread.

[0005] Early detection is difficult since clinical symptoms are often not seen until the disease has reached an advanced stage. Currently, diagnosis is aided by the use of chest x-rays, analysis of the type of cells contained in sputum and fiberoptic examination of the bronchial passages. Treatment regimens are determined by the type and stage of the cancer, and include surgery, radiation therapy and/or chemotherapy.

[0006] In spite of considerable research into therapies for this and other cancers, lung cancer remains difficult to diagnose and treat effectively. Accordingly, there is a need in the art for improved methods for detecting and treating such cancers. The present invention fulfills these needs and farther provides other related advantages.

### SUMMARY OF THE INVENTION

[0007] In one aspect, the present invention provides polynucleotide compositions comprising a sequence selected from the group consisting of:

[0008] (a) sequences provided in SEQ ID NOs:1-57, 59-323, 341-782, 784-785, 788, 790, 792, 794, 796, 800-804, 807, 808, 810-826, 8781664, 1668, 1669, 1676, 1680-1805, 1824, 1826-1829, 1865-1868, 1873, 1883 and 1884-1890;

[0009] (b) complements of the sequences provided in SEQ ID NOs:1-57, 59-323, 341-782, 784-785, 788, 790, 792, 794, 796, 800-804, 807, 808, 810-826, 878-1664, 1668, 1669, 1676, 1680-1805, 1824, 1826-1829, 1865-1868, 1873, 1883 and 1884-1890;

[0010] (c) sequences consisting of at least 20 contiguous residues of a sequence provided in SEQ ID NOs:1-57, 59-323, 341-782, 784-785, 788, 790, 792, 794, 796, 800-804, 807, 808, 810-826, 878-1664, 1668, 1669, 1676, 1680-1805, 1824, 1826-1829, 1865-1868, 1873, 1883 and 1884-1890;

[0011] (d) sequences that hybridize to a sequence provided in SEQ ID NOs: 1 -57, 59-323, 341-782, 784-785, 788, 790, 792, 794, 796, 800-804, 807, 808, 810-826, 878-1664, 1668, 1669, 1676, 1680-1805, 1824, 1826-1829, 1865-1868, 1873, 1883 and 1884-1890, under moderately stringent conditions;

[0012] (e) sequences having at least 75% identity to a sequence of SEQ ID NOs:1-57, 59-323, 341-782, 784-785, 788, 790, 792, 794, 796, 800-804, 807, 808, 810-826, 878-1664, 1668, 1669, 1676, 1680-1805, 1824, 1826-1829, 1865-1868, 1873, 1883 and 1884-1890;

[0013] (f) sequences having at least 90% identity to a sequence of SEQ ID NOs:1-57, 59-323, 341-782, 784-785, 788, 790, 792, 794, 796, 800-804, 807, 808, 810-826, 878-1664, 1668, 1669, 1676, 1680-1805, 1824, 1826-1829, 1865-1868, 1873, 1883 and 1884-1890; and

[0014] (g) degenerate variants of a sequence provided in SEQ ID NOs:1-57, 59-323, 341-782, 784-785, 788, 790, 792, 794, 796, 800-804, 807, 808, 810-826, 878-1664, 1668, 1669, 1676, 1680-1805, 1824, 1826-1829, 1865-1868, 1873, 1883 and 1884-1890.

[0015] In one preferred embodiment, the polynucleotide compositions of the invention are expressed in at least about 20%, more preferably in at least about 30%, and most preferably in at least about 50% of lung tumors samples tested, at a level that is at least about 2-fold, preferably at least about 5-fold, and most preferably at least about 10-fold higher than that for normal tissues.

[0016] The present invention, in another aspect, provides polypeptide compositions comprising an amino acid sequence that is encoded by a polynucleotide sequence described above.

[0017] The present invention further provides polypeptide compositions comprising an amino acid sequence selected from the group consisting of sequences recited in SEQ ID NOs:324-340, 783, 786, 787, 789, 791, 793, 795, 797-799, 805, 806, 809, 827, 1667, 1670-1675, 1677-1679, 1806-1822, 1825, 1830-1833, 1834-1856, 1869-1872 and 1874.

[0018] In certain preferred embodiments, the polypeptides and/or polynucleotides of the present invention are immunogenic, i.e., they are capable of eliciting an immune response, particularly a humoral and/or cellular immune response, as further described herein.

[0019] The present invention further provides fragments, variants and/or derivatives of the disclosed polypeptide and/or polynucleotide sequences, wherein the fragments, variants and/or derivatives preferably have a level of immunogenic activity of at least about 50%, preferably at least about 70% and more preferably at least about 90% of the level of immunogenic activity of a polypeptide sequence set forth in SEQ ID NOs:324-340, 783, 786, 787, 789, 791, 793, 795, 797-799, 805, 806, 809, 827, 1667, 1670-1675, 1677-1679, 1806-1822, 1825, 1830-1833, 1834-1856, 1869-1872 and 1874 or a polypeptide sequence encoded by a polynucleotide sequence set forth in SEQ ID NOs:1-57, 59-323, 341-782, 784-785, 788, 790, 792, 794, 796, 800-804, 807, 808, 810-826, 878-1382, 1384-1559, 1561-1664, 1668, 1669, 1676, 1680-1706, 1708-1732, 1734, 1736-1757, 1759-1765, 1767-1770, 1772-1774, 1776-1805, 1824, 1826-1829, 1865-1868, 1873, 1883 and 1884-1890.

[0020] The present invention further provides polynucleotides that encode a polypeptide described above, expression vectors comprising such polynucleotides and host cells transformed or transfected with such expression vectors.

[0021] Within other aspects, the present invention provides pharmaceutical compositions comprising a polypeptide or polynucleotide as described above and a physiologically acceptable carrier.

[0022] Within a related aspect of the present invention, the pharmaceutical compositions, e.g., vaccine compositions, are provided for prophylactic or therapeutic applications. Such compositions generally comprise an immunogenic polypeptide or polynucleotide of the invention and an immunostimulant, such as an adjuvant.

[0023] The present invention further provides pharmaceutical compositions that comprise: (a) an antibody or antigen-binding fragment thereof that specifically binds to a polypeptide of the present invention, or a fragment thereof; and (b) a physiologically acceptable carrier.

[0024] Within further aspects, the present invention provides pharmaceutical compositions comprising: (a) an antigen presenting cell that expresses a polypeptide as described above and (b) a pharmaceutically acceptable carrier or excipient. Illustrative antigen presenting cells include dendritic cells, macrophages, monocytes, fibroblasts and B cells.

[0025] Within related aspects, pharmaceutical compositions are provided that comprise: (a) an antigen presenting cell that expresses a polypeptide as described above and (b) an immunostimulant.

[0026] The present invention further provides, in other aspects, fusion proteins that comprise at least one polypeptide as described above, as well as polynucleotides encoding such fusion proteins, typically in the form of pharmaceutical compositions, e.g., vaccine compositions, comprising a physiologically acceptable carrier and/or an immunostimulant. The fusions proteins may comprise multiple immunogenic polypeptides or portions/variants thereof, as described herein, and may further comprise one or more polypeptide segments for facilitating the expression, purification and/or immunogenicity of the polypeptide(s).

[0027] Within further aspects, the present invention provides methods for stimulating an immune response in a patient, preferably a T cell response in a human patient, comprising administering a pharmaceutical composition described herein. The patient may be afflicted with lung cancer, in which case the methods provide treatment for the disease, or patient considered at risk for such a disease may be treated prophylactically.

[0028] Within further aspects, the present invention provides methods for inhibiting the development of a cancer in a patient, comprising administering to a patient a pharmaceutical composition as recited above. The patient may be afflicted with lung cancer, in which case the methods provide treatment for the disease, or patient considered at risk for such a disease may be treated prophylactically.

[0029] The present invention further provides, within other aspects, methods for removing tumor cells from a biological sample, comprising contacting a biological sample with T cells that specifically react with a polypeptide of the present invention, wherein the step of contacting is performed under conditions and for a time sufficient to permit the removal of cells expressing the protein from the sample.

[0030] Within related aspects, methods are provided for inhibiting the development of a cancer in a patient, comprising administering to a patient a biological sample treated as described above.

[0031] Methods are further provided, within other aspects, for stimulating and/or expanding T cells specific for a polypeptide of the present invention, comprising contacting T cells with one or more of: (i) a polypeptide as described above; (ii) a polynucleotide encoding such a polypeptide; and/or (iii) an antigen presenting cell that expresses such a polypeptide; under conditions and for a time sufficient to permit the stimulation and/or expansion of T cells. Isolated T cell populations comprising T cells prepared as described above are also provided.

[0032] Within further aspects, the present invention provides methods for inhibiting the development of a cancer in a patient, comprising administering to a patient an effective amount of a T cell population as described above.

[0033] The present invention further provides methods for inhibiting the development of a cancer in a patient, comprising the steps of: (a) incubating CD4⁺ and/or CD8⁺ T cells isolated from a patient with one or more of: (i) a polypeptide comprising at least an immunogenic portion of polypeptide disclosed herein; (ii) a polynucleotide encoding such a polypeptide; and (iii) an antigen-presenting cell that expressed such a polypeptide; and (b) administering to the patient an effective amount of the proliferated T cells, and thereby inhibiting the development of a cancer in the patient. Proliferated cells may, but need not, be cloned prior to administration to the patient.

[0034] Within further aspects, the present invention provides methods for determining the presence or absence of a cancer, preferably a lung cancer, in a patient comprising: (a) contacting a biological sample obtained from a patient with a binding agent that binds to a polypeptide as recited above; (b) detecting in the sample an amount of polypeptide that binds to the binding agent; and (c) comparing the amount of polypeptide with a predetermined cut-off value, and therefrom determining the presence or absence of a cancer in the patient. Within preferred embodiments, the binding agent is an antibody, more preferably a monoclonal antibody.

[0035] The present invention also provides, within other aspects, methods for monitoring the progression of a cancer in a patient. Such methods comprise the steps of:

[0036] (a) contacting a biological sample obtained from a patient at a first point in time with a binding agent that binds to a polypeptide as recited above; (b) detecting in the sample an amount of polypeptide that binds to the binding agent; (c) repeating steps (a) and (b) using a biological sample obtained from the patient at a subsequent point in time; and (d) comparing the amount of polypeptide detected in step (c) with the amount detected in step (b) and therefrom monitoring the progression of the cancer in the patient.

[0037] The present invention further provides, within other aspects, methods for determining the presence or absence of a cancer in a patient, comprising the steps of: (a) contacting a biological sample obtained from a patient with an oligonucleotide that hybridizes to a polynucleotide that encodes a polypeptide of the present invention; (b) detecting in the sample a level of a polynucleotide, preferably mRNA, that hybridizes to the oligonucleotide; and (c) comparing the level of polynucleotide that hybridizes to the oligonucleotide with a predetermined cut-off value, and therefrom determining the presence or absence of a cancer in the patient. Within certain embodiments, the amount of mRNA is detected via polymerase chain reaction using, for example, at least one oligonucleotide primer that hybridizes to a polynucleotide encoding a polypeptide as recited above, or a complement of such a polynucleotide. Within other embodiments, the amount of mRNA is detected using a hybridization technique, employing an oligonucleotide probe that hybridizes to a polynucleotide that encodes a polypeptide as recited above, or a complement of such a polynucleotide.

[0038] In related aspects, methods are provided for monitoring the progression of a cancer in a patient, comprising the steps of: (a) contacting a biological sample obtained from a patient with an oligonucleotide that hybridizes to a polynucleotide that encodes a polypeptide of the present invention; (b) detecting in the sample an amount of a polynucleotide that hybridizes to the oligonucleotide; (c) repeating steps (a) and (b) using a biological sample obtained from the patient at a subsequent point in time; and (d) comparing the amount of polynucleotide detected in step (c) with the amount detected in step (b) and therefrom monitoring the progression of the cancer in the patient.

[0039] Within further aspects, the present invention provides antibodies, such as monoclonal antibodies, that bind to a polypeptide as described above, as well as diagnostic kits comprising such antibodies. Diagnostic kits comprising one or more oligonucleotide probes or primers as described above are also provided.

[0040] These and other aspects of the present invention will become apparent upon reference to the following detailed description. All references disclosed herein are hereby incorporated by reference in their entirety as if each was incorporated individually.

[0041] Sequence Identifiers

[0042] SEQ ID NO: 1 is the determined cDNA sequence for clone #19038, also referred to as L845P.

[0043] SEQ ID NO: 2 is the determined cDNA sequence for clone #19036.

[0044] SEQ ID NO: 3 is the determined cDNA sequence for clone #19034.

[0045] SEQ ID NO: 4 is the determined cDNA sequence for clone #19033.

[0046] SEQ ID NO: 5 is the determined cDNA sequence for clone #19032.

[0047] SEQ ID NO: 6 is the determined cDNA sequence for clone #19030, also referred to as L559S.

[0048] SEQ ID NO: 7 is the determined cDNA sequence for clone #19029.

[0049] SEQ ID NO: 8 is the determined cDNA sequence for clone #19025.

[0050] SEQ ID NO: 9 is the determined cDNA sequence for clone #19023.

[0051] SEQ ID NO: 10 is the determined cDNA sequence for clone #18929.

[0052] SEQ ID NO: 11 is the determined cDNA sequence for clone #19010.

[0053] SEQ ID NO: 12 is the determined cDNA sequence for clone #19009.

[0054] SEQ ID NO: 13 is the determined cDNA sequence for clones #19005, 19007, 19016 and 19017.

[0055] SEQ ID NO: 14 is the determined cDNA sequence for clone #19004.

[0056] SEQ ID NO: 15 is the determined cDNA sequence for clones #19002 and 18965.

[0057] SEQ ID NO: 16 is the determined cDNA sequence for clone #18998.

[0058] SEQ ID NO: 17 is the determined cDNA sequence for clone #18997.

[0059] SEQ ID NO: 18 is the determined cDNA sequence for clone #18996.

[0060] SEQ ID NO: 19 is the determined cDNA sequence for clone #18995.

[0061] SEQ ID NO: 20 is the determined cDNA sequence for clone #18994, also known as L846P.

[0062] SEQ ID NO: 21 is the determined cDNA sequence for clone #18992.

[0063] SEQ ID NO: 22 is the determined cDNA sequence for clone #18991.

[0064] SEQ ID NO: 23 is the determined cDNA sequence for clone #18990, also referred to as clone #20111.

[0065] SEQ ID NO: 24 is the determined cDNA sequence for clone #18987.

[0066] SEQ ID NO: 25 is the determined cDNA sequence for clone #18985, also referred as L839P.

[0067] SEQ ID NO: 26 is the determined cDNA sequence for clone #18984, also referred to as L847P.

[0068] SEQ ID NO: 27 is the determined cDNA sequence for clone #18983.

[0069] SEQ ID NO: 28 is the determined cDNA sequence for clones #18976 and 18980.

[0070] SEQ ID NO: 29 is the determined cDNA sequence for clone #18975.

[0071] SEQ ID NO: 30 is the determined cDNA sequence for clone #18974.

[0072] SEQ ID NO: 31 is the determined cDNA sequence for clone #18973.

[0073] SEQ ID NO: 32 is the determined cDNA sequence for clone #18972.

[0074] SEQ ID NO: 33 is the determined cDNA sequence for clone #18971, also referred to as L801P.

[0075] SEQ ID NO: 34 is the determined cDNA sequence for clone #18970.

[0076] SEQ ID NO: 35 is the determined cDNA sequence for clone #18966.

[0077] SEQ ID NO: 36 is the determined cDNA sequence for clones #18964, 18968 and 19039.

[0078] SEQ ID NO: 37 is the determined cDNA sequence for clone #18960.

[0079] SEQ ID NO: 38 is the determined cDNA sequence for clone #18959.

[0080] SEQ ID NO: 39 is the determined cDNA sequence for clones #18958 and 18982.

[0081] SEQ ID NO: 40 is the determined cDNA sequence for clones #18956 and 19015.

[0082] SEQ ID NO: 41 is the determined cDNA sequence for clone #18954, also referred to L848P.

[0083] SEQ ID NO: 42 is the determined cDNA sequence for clone 18951.

[0084] SEQ ID NO: 43 is the determined cDNA sequence for clone #18950.

[0085] SEQ ID NO: 44 is the determined cDNA sequence for clones #18949 and 19024, also referred to as L844P.

[0086] SEQ ID NO: 45 is the determined cDNA sequence for clone #18948.

[0087] SEQ ID NO: 46 is the determined cDNA sequence for clone #18947, also referred to as L840P.

[0088] SEQ ID NO: 47 is the determined cDNA sequence for clones #18946, 18953, 18969 and 19027.

[0089] SEQ ID NO: 48 is the determined cDNA sequence for clone #18942.

[0090] SEQ ID NO: 49 is the determined cDNA sequence for clone #18940, 18962, 18963, 19006, 19008, 19000, and 19031.

[0091] SEQ ID NO: 50 is the determined cDNA sequence for clone #18939.

[0092] SEQ ID NO: 51 is the determined cDNA sequence for clones #18938 and 18952.

[0093] SEQ ID NO: 52 is the determined cDNA sequence for clone #18938.

[0094] SEQ ID NO: 53 is the determined cDNA sequence for clone #18937.

[0095] SEQ ID NO: 54 is the determined cDNA sequence for clones #18934, 18935, 18993 and 19022, also referred to as L548S.

[0096] SEQ ID NO: 55 is the determined cDNA sequence for clone #18932.

[0097] SEQ ID NO: 56 is the determined cDNA sequence for clones #18931 and 18936.

[0098] SEQ ID NO: 57 is the determined cDNA sequence for clone #18930.

[0099] SEQ ID NO:58 is the determined cDNA sequence for clone #19014 (this sequence has homology to clone L773P, which is also described in co-pending U.S. application 09/285,479, filed Apr. 2, 1999).

[0100] SEQ ID NO: 59 is the determined cDNA sequence for clone #19127.

[0101] SEQ ID NO: 60 is the determined cDNA sequence for clones #19057 and 19064.

[0102] SEQ ID NO: 61 is the determined cDNA sequence for clone 19122.

[0103] SEQ ID NO: 62 is the determined cDNA sequence for clones #19120 and 18121.

[0104] SEQ ID NO: 63 is the determined cDNA sequence for clone #19118.

[0105] SEQ ID NO: 64 is the determined cDNA sequence for clone #19117.

[0106] SEQ ID NO: 65 is the determined cDNA sequence for clone #19116.

[0107] SEQ ID NO: 66 is the determined cDNA sequence for clone #19114.

[0108] SEQ ID NO: 67 is the determined cDNA sequence for clone #19112, also known as L561S.

[0109] SEQ ID NO: 68 is the determined cDNA sequence for clone #19110.

[0110] SEQ ID NO: 69 is the determined cDNA sequence for clone #19107, also referred to as L552S.

[0111] SEQ ID NO: 70 is the determined cDNA sequence for clone #19106, also referred to as L547D.

[0112] SEQ ID NO: 71 is the determined cDNA sequence for clones #19105 and 19111.

[0113] SEQ ID NO: 72 is the determined cDNA sequence for clone #19099.

[0114] SEQ ID NO: 73 is the determined cDNA sequence for clones #19095, 19104 and 19125, also referred to as L549S.

[0115] SEQ ID NO: 74 is the determined cDNA sequence for clone #19094.

[0116] SEQ ID NO: 75 is the determined cDNA sequence for clones #19089 and 19101.

[0117] SEQ ID NO: 76 is the determined cDNA sequence for clone #19088.

[0118] SEQ ID NO: 77 is the determined cDNA sequence for clones #19087, 19092, 19096, 19100 and 19119.

[0119] SEQ ID NO: 78 is the determined cDNA sequence for clone #19086.

[0120] SEQ ID NO: 79 is the determined cDNA sequence for clone #19085, also referred to as L550S.

[0121] SEQ ID NO: 80 is the determined cDNA sequence for clone #19084, also referred to as clone #19079.

[0122] SEQ ID NO: 81 is the determined cDNA sequence for clone #19082.

[0123] SEQ ID NO: 82 is the determined cDNA sequence for clone #19080.

[0124] SEQ ID NO: 83 is the determined cDNA sequence for clone #19077.

[0125] SEQ ID NO: 84 is the determined cDNA sequence for clone #19076, also referred to as L551S.

[0126] SEQ ID NO: 85 is the determined cDNA sequence for clone #19074, also referred to as clone #20102.

[0127] SEQ ID NO: 86 is the determined cDNA sequence for clone #19073, also referred to as L560S.

[0128] SEQ ID NO: 87 is the determined cDNA sequence for clones #19072 and 19115.

[0129] SEQ ID NO: 88 is the determined cDNA sequence for clone #19071.

[0130] SEQ ID NO: 89 is the determined cDNA sequence for clone #19070.

[0131] SEQ ID NO: 90 is the determined cDNA sequence for clone #19069.

[0132] SEQ ID NO: 91 is the determined cDNA sequence for clone #19068, also referred to L563S.

[0133] SEQ ID NO: 92 is the determined cDNA sequence for clone #19066.

[0134] SEQ ID NO: 93 is the determined cDNA sequence for clone #19065.

[0135] SEQ ID NO: 94 is the determined cDNA sequence for clone #19063.

[0136] SEQ ID NO: 95 is the determined cDNA sequence for clones #19061, 19081, 19108 and 19109.

[0137] SEQ ID NO: 96 is the determined cDNA sequence for clones #19060, 19067 and 19083, also referred to as L548S.

[0138] SEQ ID NO: 97 is the determined cDNA sequence for clones #19059 and 19062.

[0139] SEQ ID NO: 98 is the determined cDNA sequence for clone #19058.

[0140] SEQ ID NO: 99 is the determined cDNA sequence for clone #19124.

[0141] SEQ ID NO: 100 is the determined cDNA sequence for clone #18929.

[0142] SEQ ID NO: 101 is the determined cDNA sequence for clone #18422.

[0143] SEQ ID NO: 102 is the determined cDNA sequence for clone #18425.

[0144] SEQ ID NO: 103 is the determined cDNA sequence for clone #18431.

[0145] SEQ ID NO: 104 is the determined cDNA sequence for clone #18433.

[0146] SEQ ID NO: 105 is the determined cDNA sequence for clone #18444.

[0147] SEQ ID NO: 106 is the determined cDNA sequence for clone 18449.

[0148] SEQ ID NO: 107 is the determined cDNA sequence for clone #18451.

[0149] SEQ ID NO: 108 is the determined cDNA sequence for clone #18452.

[0150] SEQ ID NO: 109 is the determined cDNA sequence for clone #18455.

[0151] SEQ ID NO: 110 is the determined cDNA sequence for clone #18457.

[0152] SEQ ID NO: 111 is the determined cDNA sequence for clone #18466.

[0153] SEQ ID NO: 112 is the determined cDNA sequence for clone #18468.

[0154] SEQ ID NO: 113 is the determined cDNA sequence for clone #18471.

[0155] SEQ ID NO: 114 is the determined cDNA sequence for clone #18475.

[0156] SEQ ID NO: 115 is the determined cDNA sequence for clone # 18476.

[0157] SEQ ID NO: 116 is the determined cDNA sequence for clone #18477.

[0158] SEQ ID NO: 117 is the determined cDNA sequence for clone #20631.

[0159] SEQ ID NO: 118 is the determined cDNA sequence for clone #20634.

[0160] SEQ ID NO: 119 is the determined cDNA sequence for clone #20635.

[0161] SEQ ID NO: 120 is the determined cDNA sequence for clone #20637.

[0162] SEQ ID NO: 121 is the determined cDNA sequence for clone #20638.

[0163] SEQ ID NO: 122 is the determined cDNA sequence for clone #20643.

[0164] SEQ ID NO: 123 is the determined cDNA sequence for clone #20652.

[0165] SEQ ID NO: 124 is the determined cDNA sequence for clone #420653.

[0166] SEQ ID NO: 125 is the determined cDNA sequence for clone #20657.

[0167] SEQ ID NO: 126 is the determined cDNA sequence for clone #20658.

[0168] SEQ ID NO: 127 is the determined cDNA sequence for clone #20660.

[0169] SEQ ID NO: 128 is the determined cDNA sequence for clone #20661.

[0170] SEQ ID NO: 129 is the determined cDNA sequence for clone #20663.

[0171] SEQ ID NO: 130 is the determined cDNA sequence for clone #20665.

[0172] SEQ ID NO: 131 is the determined cDNA sequence for clone #20670.

[0173] SEQ ID NO: 132 is the determined cDNA sequence for clone #20671.

[0174] SEQ ID NO: 133 is the determined cDNA sequence for clone #20672.

[0175] SEQ ID NO: 134 is the determined cDNA sequence for clone #20675.

[0176] SEQ ID NO: 135 is the determined cDNA sequence for clone #20679.

[0177] SEQ ID NO: 136 is the determined cDNA sequence for clone #20681.

[0178] SEQ ID NO: 137 is the determined cDNA sequence for clone #20682.

[0179] SEQ ID NO: 138 is the determined cDNA sequence for clone #20684.

[0180] SEQ ID NO: 139 is the determined cDNA sequence for clone #20685.

[0181] SEQ ID NO: 140 is the determined cDNA sequence for clone #20689.

[0182] SEQ ID NO: 141 is the determined cDNA sequence for clone #20699.

[0183] SEQ ID NO: 142 is the determined cDNA sequence for clone #20701.

[0184] SEQ ID NO: 143 is the determined cDNA sequence for clone #20702.

[0185] SEQ ID NO: 144 is the determined cDNA sequence for clone #20708.

[0186] SEQ ID NO: 145 is the determined cDNA sequence for clone #20715.

[0187] SEQ ID NO: 146 is the determined cDNA sequence for clone #20716.

[0188] SEQ ID NO: 147 is the determined cDNA sequence for clone #20719.

[0189] SEQ ID NO: 148 is the determined cDNA sequence for clone #19129.

[0190] SEQ ID NO: 149 is the determined cDNA sequence for clone #19131.1.

[0191] SEQ ID NO: 150 is the determined cDNA sequence for clone #19132.2.

[0192] SEQ ID NO: 151 is the determined cDNA sequence for clone #19133.

[0193] SEQ ID NO: 152 is the determined cDNA sequence for clone #19134.2.

[0194] SEQ ID NO: 153 is the determined cDNA sequence for clone #19135.2.

[0195] SEQ ID NO: 154 is the determined cDNA sequence for clone #19137.

[0196] SEQ ID NO: 155 is a first determined cDNA sequence for clone #19138.1.

[0197] SEQ ID NO: 156 is a second determined cDNA sequence for clone #19138.2.

[0198] SEQ ID NO: 157 is the determined cDNA sequence for clone #19139.

[0199] SEQ ID NO: 158 is a first determined cDNA sequence for clone #19140.1.

[0200] SEQ ID NO: 159 is a second determined cDNA sequence for clone #19140.2.

[0201] SEQ ID NO: 160 is the determined cDNA sequence for clone #19141.

[0202] SEQ ID NO: 161 is the determined cDNA sequence for clone #19143.

[0203] SEQ ID NO: 162 is the determined cDNA sequence for clone #19144.

[0204] SEQ ID NO: 163 is a first determined cDNA sequence for clone #19145.1.

[0205] SEQ ID NO: 164 is a second determined cDNA sequence for clone #19145.2.

[0206] SEQ ID NO: 165 is the determined cDNA sequence for clone #19146.

[0207] SEQ ID NO: 166 is the determined cDNA sequence for clone #19149.1.

[0208] SEQ ID NO: 167 is the determined cDNA sequence for clone #19152.

[0209] SEQ ID NO: 168 is a first determined cDNA sequence for clone #19153.1.

[0210] SEQ ID NO: 169 is a second determined cDNA sequence for clone #19153.2.

[0211] SEQ ID NO: 170 is the determined cDNA sequence for clone #19155.

[0212] SEQ ID NO: 171 is the determined cDNA sequence for clone #191537.

[0213] SEQ ID NO: 172 is the determined cDNA sequence for clone #19159.

[0214] SEQ ID NO: 173 is the determined cDNA sequence for clone #19160.

[0215] SEQ ID NO: 174 is a first determined cDNA sequence for clone #19161.1.

[0216] SEQ ID NO: 175 is a second determined cDNA sequence for clone #19161.2.

[0217] SEQ ID NO: 176 is the determined cDNA sequence for clone #19162.1.

[0218] SEQ ID NO: 177 is the determined cDNA sequence for clone #19166.

[0219] SEQ ID NO: 178 is the determined cDNA sequence for clone #19169.

[0220] SEQ ID NO: 179 is the determined cDNA sequence for clone #19171.

[0221] SEQ ID NO: 180 is a first determined cDNA sequence for clone #19173.1.

[0222] SEQ ID NO: 181 is a second determined cDNA sequence for clone #19173.2.

[0223] SEQ ID NO: 182 is the determined cDNA sequence for clone #19174.1.

[0224] SEQ ID NO: 183 is the determined cDNA sequence for clone #19175.

[0225] SEQ ID NO: 184 is the determined cDNA sequence for clone #19177.

[0226] SEQ ID NO: 185 is the determined cDNA sequence for clone #19178.

[0227] SEQ ID NO: 186 is the determined cDNA sequence for clone #19179.1.

[0228] SEQ ID NO: 187 is the determined cDNA sequence for clone #19179.2.

[0229] SEQ ID NO: 188 is the determined cDNA sequence for clone #19180.

[0230] SEQ ID NO: 189 is a first determined cDNA sequence for clone #19182.1.

[0231] SEQ ID NO: 190 is a second determined cDNA sequence for clone #19182.2.

[0232] SEQ ID NO: 191 is the determined cDNA sequence for clone #19183.1.

[0233] SEQ ID NO: 192 is the determined cDNA sequence for clone #19185.1.

[0234] SEQ ID NO: 193 is the determined cDNA sequence for clone #19187.

[0235] SEQ ID NO: 194 is the determined cDNA sequence for clone #19188.

[0236] SEQ ID NO: 195 is the determined cDNA sequence for clone #19190.

[0237] SEQ ID NO: 196 is the determined cDNA sequence for clone #19191.

[0238] SEQ ID NO: 197 is the determined cDNA sequence for clone #19192.

[0239] SEQ ID NO: 198 is the determined cDNA sequence for clone #19193.

[0240] SEQ ID NO: 199 is a first determined cDNA sequence for clone #19194.1.

[0241] SEQ ID NO: 200 is a second determined cDNA sequence for clone #19194.2.

[0242] SEQ ID NO: 201 is the determined cDNA sequence for clone #19197.

[0243] SEQ ID NO: 202 is a first determined cDNA sequence for clone #19200.1.

[0244] SEQ ID NO: 203 is a second determined cDNA sequence for clone #19200.2.

[0245] SEQ ID NO: 204 is the determined cDNA sequence for clone #19202.

[0246] SEQ ID NO: 205 is a first determined cDNA sequence for clone #19204.1.

[0247] SEQ ID NO: 206 is a second determined cDNA sequence for clone #19204.2.

[0248] SEQ ID NO: 207 is the determined cDNA sequence for clone #19205.

[0249] SEQ ID NO: 208 is a first determined cDNA sequence for clone #19206.1.

[0250] SEQ ID NO: 209 is a second determined cDNA sequence for clone #19206.2.

[0251] SEQ ID NO: 210 is the determined cDNA sequence for clone #19207.

[0252] SEQ ID NO: 211 is the determined cDNA sequence for clone #19208.

[0253] SEQ ID NO: 212 is a first determined cDNA sequence for clone #19211.1.

[0254] SEQ ID NO: 213 is a second determined cDNA sequence for clone #19211.2.

[0255] SEQ ID NO: 214 is a first determined cDNA sequence for clone #19214.1.

[0256] SEQ ID NO: 215 is a second determined cDNA sequence for clone #19214.2.

[0257] SEQ ID NO: 216 is the determined cDNA sequence for clone #19215.

[0258] SEQ ID NO: 217 is a first determined cDNA sequence for clone #19217.2.

[0259] SEQ ID NO: 218 is a second determined cDNA sequence for clone #19217.2.

[0260] SEQ ID NO: 219 is a first determined cDNA sequence for clone #19218.1.

[0261] SEQ ID NO: 220 is a second determined cDNA sequence for clone #19218.2.

[0262] SEQ ID NO: 221 is a first determined cDNA sequence for clone #19220.1.

[0263] SEQ ID NO: 222 is a second determined cDNA sequence for clone #19220.2.

[0264] SEQ ID NO: 223 is the determined cDNA sequence for clone #22015.

[0265] SEQ ID NO: 224 is the determined cDNA sequence for clone #22017.

[0266] SEQ ID NO: 225 is the determined cDNA sequence for clone #22019.

[0267] SEQ ID NO: 226 is the determined cDNA sequence for clone #22020.

[0268] SEQ ID NO: 227 is the determined cDNA sequence for clone #22023.

[0269] SEQ ID NO: 228 is the determined cDNA sequence for clone #22026.

[0270] SEQ ID NO: 229 is the determined cDNA sequence for clone #22027.

[0271] SEQ ID NO: 230 is the determined cDNA sequence for clone #22028.

[0272] SEQ ID NO: 231 is the determined cDNA sequence for clone #22032.

[0273] SEQ ID NO: 232 is the determined cDNA sequence for clone #22037.

[0274] SEQ ID NO: 233 is the determined cDNA sequence for clone #22045.

[0275] SEQ ID NO: 234 is the determined cDNA sequence for clone #22048.

[0276] SEQ ID NO: 235 is the determined cDNA sequence for clone #22050.

[0277] SEQ ID NO: 236 is the determined cDNA sequence for clone #22052.

[0278] SEQ ID NO: 237 is the determined cDNA sequence for clone #22053.

[0279] SEQ ID NO: 238 is the determined cDNA sequence for clone #22057.

[0280] SEQ ID NO: 239 is the determined cDNA sequence for clone #22066.

[0281] SEQ ID NO: 240 is the determined cDNA sequence for clone #22077.

[0282] SEQ ID NO: 241 is the determined cDNA sequence for clone #22085.

[0283] SEQ ID NO: 242 is the determined cDNA sequence for clone #22105.

[0284] SEQ ID NO: 243 is the determined cDNA sequence for clone #22108.

[0285] SEQ ID NO: 244 is the determined cDNA sequence for clone #22109.

[0286] SEQ ID NO: 245 is the determined cDNA sequence for clone #24842.

[0287] SEQ ID NO: 246 is the determined cDNA sequence for clone #24843.

[0288] SEQ ID NO: 247 is the determined cDNA sequence for clone #24845.

[0289] SEQ ID NO: 248 is the determined cDNA sequence for clone #24851.

[0290] SEQ ID NO: 249 is the determined cDNA sequence for clone #24852.

[0291] SEQ ID NO: 250 is the determined cDNA sequence for clone #24853.

[0292] SEQ ID NO: 251 is the determined cDNA sequence for clone #24854.

[0293] SEQ ID NO: 252 is the determined cDNA sequence for clone #24855.

[0294] SEQ ID NO: 253 is the determined cDNA sequence for clone #24860.

[0295] SEQ ID NO: 254 is the determined cDNA sequence for clone #24864.

[0296] SEQ ID NO: 255 is the determined cDNA sequence for clone #24866.

[0297] SEQ ID NO: 256 is the determined cDNA sequence for clone #24867.

[0298] SEQ ID NO: 257 is the determined cDNA sequence for clone #24868.

[0299] SEQ ID NO: 258 is the determined cDNA sequence for clone #24869.

[0300] SEQ ID NO: 259 is the determined cDNA sequence for clone #24870.

[0301] SEQ ID NO: 260 is the determined cDNA sequence for clone #24872.

[0302] SEQ ID NO: 261 is the determined cDNA sequence for clone #24873.

[0303] SEQ ID NO: 262 is the determined cDNA sequence for clone #24875.

[0304] SEQ ID NO: 263 is the determined cDNA sequence for clone #24882.

[0305] SEQ ID NO: 264 is the determined cDNA sequence for clone #24885.

[0306] SEQ ID NO: 265 is the determined cDNA sequence for clone #24886.

[0307] SEQ ID NO: 266 is the determined cDNA sequence for clone #24887.

[0308] SEQ ID NO: 267 is the determined cDNA sequence for clone #24888.

[0309] SEQ ID NO: 268 is the determined cDNA sequence for clone #24890.

[0310] SEQ ID NO: 269 is the determined cDNA sequence for clone #24896.

[0311] SEQ ID NO: 270 is the determined cDNA sequence for clone #24897.

[0312] SEQ ID NO: 271 is the determined cDNA sequence for clone #24899.

[0313] SEQ ID NO: 272 is the determined cDNA sequence for clone #24901.

[0314] SEQ ID NO: 273 is the determined cDNA sequence for clone #24902.

[0315] SEQ ID NO: 274 is the determined cDNA sequence for clone #24906.

[0316] SEQ ID NO: 275 is the determined cDNA sequence for clone #24912.

[0317] SEQ ID NO: 276 is the determined cDNA sequence for clone #24913.

[0318] SEQ ID NO: 277 is the determined cDNA sequence for clone #24920.

[0319] SEQ ID NO: 278 is the determined cDNA sequence for clone #24927.

[0320] SEQ ID NO: 279 is the determined cDNA sequence for clone #24930.

[0321] SEQ ID NO: 280 is the determined cDNA sequence for clone #26938.

[0322] SEQ ID NO: 281 is the determined cDNA sequence for clone #26939.

[0323] SEQ ID NO: 282 is the determined cDNA sequence for clone #26943.

[0324] SEQ ID NO: 283 is the determined cDNA sequence for clone #26948.

[0325] SEQ ID NO: 284 is the determined cDNA sequence for clone #26951.

[0326] SEQ ID NO: 285 is the determined cDNA sequence for clone #26955.

[0327] SEQ ID NO: 286 is the determined cDNA sequence for clone #26956.

[0328] SEQ ID NO: 287 is the determined cDNA sequence for clone #26959.

[0329] SEQ ID NO: 288 is the determined cDNA sequence for clone #26961.

[0330] SEQ ID NO: 289 is the determined cDNA sequence for clone #26962.

[0331] SEQ ID NO: 290 is the determined cDNA sequence for clone #26964.

[0332] SEQ ID NO: 291 is the determined cDNA sequence for clone #26966.

[0333] SEQ ID NO: 292 is the determined cDNA sequence for clone #26968.

[0334] SEQ ID NO: 293 is the determined cDNA sequence for clone #26972.

[0335] SEQ ID NO: 294 is the determined cDNA sequence for clone #26973.

[0336] SEQ ID NO: 295 is the determined cDNA sequence for clone #26974.

[0337] SEQ ID NO: 296 is the determined cDNA sequence for clone #26976.

[0338] SEQ ID NO: 297 is the determined cDNA sequence for clone #26977.

[0339] SEQ ID NO: 298 is the determined cDNA sequence for clone #26979.

[0340] SEQ ID NO: 299 is the determined cDNA sequence for clone #26980.

[0341] SEQ ID NO: 300 is the determined cDNA sequence for clone #26981.

[0342] SEQ ID NO: 301 is the determined cDNA sequence for clone #26984.

[0343] SEQ ID NO: 302 is the determined cDNA sequence for clone #26985.

[0344] SEQ ID NO: 303 is the determined cDNA sequence for clone #26986.

[0345] SEQ ID NO: 304 is the determined cDNA sequence for clone #26993.

[0346] SEQ ID NO: 305 is the determined cDNA sequence for clone #26994.

[0347] SEQ ID NO: 306 is the determined cDNA sequence for clone #26995.

[0348] SEQ ID NO: 307 is the determined cDNA sequence for clone #27003.

[0349] SEQ ID NO: 308 is the determined cDNA sequence for clone #27005.

[0350] SEQ ID NO: 309 is the determined cDNA sequence for clone #27010.

[0351] SEQ ID NO: 310 is the determined cDNA sequence for clone #27011.

[0352] SEQ ID NO: 311 is the determined =DNA sequence for clone #27013.

[0353] SEQ ID NO: 312 is the determined cDNA sequence for clone #27016

[0354] SEQ ID NO: 313 is the determined cDNA sequence for clone #27017.

[0355] SEQ ID NO: 314 is the determined cDNA sequence for clone #27019.

[0356] SEQ ID NO: 315 is the determined cDNA sequence for clone #27028.

[0357] SEQ ID NO: 316 is the full-length cDNA sequence for clone #19060.

[0358] SEQ ID NO: 317 is the full-length cDNA sequence for clone #18964.

[0359] SEQ ID NO: 318 is the full-length cDNA sequence for clone #18929.

[0360] SEQ ID NO: 319 is the full-length cDNA sequence for clone #18991.

[0361] SEQ ID NO: 320 is the full-length cDNA sequence for clone #18996.

[0362] SEQ ID NO: 321 is the full-length cDNA sequence for clone #18966.

[0363] SEQ ID NO: 322 is the full-length cDNA sequence for clone #18951.

[0364] SEQ ID NO: 323 is the full-length cDNA sequence for clone #18973 (also known as L516S).

[0365] SEQ ID NO: 324 is the amino acid sequence for clone #19060.

[0366] SEQ ID NO: 325 is the amino acid sequence for clone #19063.

[0367] SEQ ID NO: 326 is the amino acid sequence for clone #19077.

[0368] SEQ ID NO: 327 is the amino acid sequence for clone #19110.

[0369] SEQ ID NO: 328 is the amino acid sequence for clone #19122.

[0370] SEQ ID NO: 329 is the amino acid sequence for clone #19118.

[0371] SEQ ID NO: 330 is the amino acid sequence for clone #19080.

[0372] SEQ ID NO: 331 is the amino acid sequence for clone #19127.

[0373] SEQ ID NO: 332 is the amino acid sequence for clone #19117.

[0374] SEQ ID NO: 333 is the amino acid sequence for clone #19095, also referred to L549S.

[0375] SEQ ID NO: 334 is the amino acid sequence for clone #18964.

[0376] SEQ ID NO: 335 is the amino acid sequence for clone #18929.

[0377] SEQ ID NO: 336 is the amino acid sequence for clone #18991.

[0378] SEQ ID NO: 337 is the amino acid sequence for clone #18996.

[0379] SEQ ID NO: 338 is the amino acid sequence for clone #18966.

[0380] SEQ ID NO: 339 is the amino acid sequence for clone #18951.

[0381] SEQ ID NO: 340 is the amino acid sequence for clone #18973.

[0382] SEQ ID NO: 341 is the determined cDNA sequence for clone 26461.

[0383] SEQ ID NO: 342 is the determined cDNA sequence for clone 26462.

[0384] SEQ ID NO: 343 is the determined cDNA sequence for clone 26463.

[0385] SEQ ID NO: 344 is the determined cDNA sequence for clone 26464.

[0386] SEQ ID NO: 345 is the determined cDNA sequence for clone 26465.

[0387] SEQ ID NO: 346 is the determined cDNA sequence for clone 26466.

[0388] SEQ ID NO: 347 is the determined cDNA sequence for clone 26467.

[0389] SEQ ID NO: 348 is the determined cDNA sequence for clone 26468.

[0390] SEQ ID NO: 349 is the determined cDNA sequence for clone 26469.

[0391] SEQ ID NO: 350 is the determined cDNA sequence for clone 26470.

[0392] SEQ ID NO: 351 is the determined cDNA sequence for clone 26471.

[0393] SEQ ID NO: 352 is the determined cDNA sequence for clone 26472.

[0394] SEQ ID NO: 353 is the determined cDNA sequence for clone 26474.

[0395] SEQ ID NO: 354 is the determined cDNA sequence for clone 26475.

[0396] SEQ ID NO: 355 is the determined cDNA sequence for clone 26476.

[0397] SEQ ID NO: 356 is the determined cDNA sequence for clone 26477.

[0398] SEQ ID NO: 357 is the determined cDNA sequence for clone 26478.

[0399] SEQ ID NO: 358 is the determined cDNA sequence for clone 26479.

[0400] SEQ ID NO: 359 is the determined cDNA sequence for clone 26480.

[0401] SEQ ID NO: 360 is the determined cDNA sequence for clone 26481.

[0402] SEQ ID NO: 361 is the determined cDNA sequence for clone 26482

[0403] SEQ ID NO: 362 is the determined cDNA sequence for clone 26483.

[0404] SEQ ID NO: 363 is the determined cDNA sequence for clone 26484.

[0405] SEQ ID NO: 364 is the determined cDNA sequence for clone 26485.

[0406] SEQ ID NO: 365 is the determined cDNA sequence for clone 26486.

[0407] SEQ ID NO: 366 is the determined cDNA sequence for clone 26487.

[0408] SEQ ID NO: 367 is the determined cDNA sequence for clone 26488.

[0409] SEQ ID NO: 368 is the determined cDNA sequence for clone 26489.

[0410] SEQ ID NO: 369 is the determined cDNA sequence for clone 26490.

[0411] SEQ ID NO: 370 is the determined cDNA sequence for clone 26491.

[0412] SEQ ID NO: 371 is the determined cDNA sequence for clone 26492.

[0413] SEQ ID NO: 372 is the determined cDNA sequence for clone 26493.

[0414] SEQ ID NO: 373 is the determined cDNA sequence for clone 26494.

[0415] SEQ ID NO: 374 is the determined cDNA sequence for clone 26495.

[0416] SEQ ID NO: 375 is the determined cDNA sequence for clone 26496.

[0417] SEQ ID NO: 376 is the determined cDNA sequence for clone 26497.

[0418] SEQ ID NO: 377 is the determined cDNA sequence for clone 26498.

[0419] SEQ ID NO: 378 is the determined cDNA sequence for clone 26499.

[0420] SEQ ID NO: 379 is the determined cDNA sequence for clone 26500.

[0421] SEQ ID NO: 380 is the determined cDNA sequence for clone 26501.

[0422] SEQ ID NO: 381 is the determined cDNA sequence for clone 26502.

[0423] SEQ ID NO: 382 is the determined cDNA sequence for clone 26503.

[0424] SEQ ID NO: 383 is the determined cDNA sequence for clone 26504.

[0425] SEQ ID NO: 384 is the determined cDNA sequence for clone 26505.

[0426] SEQ ID NO: 385 is the determined cDNA sequence for clone 26506.

[0427] SEQ ID NO: 386 is the determined cDNA sequence for clone 26507.

[0428] SEQ ID NO: 387 is the determined cDNA sequence for clone 26508.

[0429] SEQ ID NO: 388 is the determined cDNA sequence for clone 26509.

[0430] SEQ ID NO: 389 is the determined cDNA sequence for clone 26511.

[0431] SEQ ID NO: 390 is the determined cDNA sequence for clone 26513.

[0432] SEQ ID NO: 391 is the determined cDNA sequence for clone 26514.

[0433] SEQ ID NO: 392 is the determined cDNA sequence for clone 26515.

[0434] SEQ ID NO: 393 is the determined cDNA sequence for clone 26516.

[0435] SEQ ID NO: 394 is the determined cDNA sequence for clone 26517.

[0436] SEQ ID NO: 395 is the determined cDNA sequence for clone 26518.

[0437] SEQ ID NO: 396 is the determined cDNA sequence for clone 26519.

[0438] SEQ ID NO: 397 is the determined cDNA sequence for clone 26520.

[0439] SEQ ID NO: 398 is the determined cDNA sequence for clone 26521.

[0440] SEQ ID NO: 399 is the determined cDNA sequence for clone 26522.

[0441] SEQ ID NO: 400 is the determined cDNA sequence for clone 26523.

[0442] SEQ ID NO: 401 is the determined cDNA sequence for clone 26524.

[0443] SEQ ID NO: 402 is the determined cDNA sequence for clone 26526.

[0444] SEQ ID NO: 403 is the determined cDNA sequence for clone 26527.

[0445] SEQ ID NO: 404 is the determined cDNA sequence for clone 26528.

[0446] SEQ ID NO: 405 is the determined cDNA sequence for clone 26529.

[0447] SEQ ID NO: 406 is the determined cDNA sequence for clone 26530.

[0448] SEQ ID NO: 407 is the determined cDNA sequence for clone 26532.

[0449] SEQ ID NO: 408 is the determined cDNA sequence for clone 26533.

[0450] SEQ ID NO: 409 is the determined cDNA sequence for clone 26534.

[0451] SEQ ID NO: 410 is the determined cDNA sequence for clone 26535.

[0452] SEQ ID NO: 411 is the determined cDNA sequence for clone 26536.

[0453] SEQ ID NO: 412 is the determined cDNA sequence for clone 26537.

[0454] SEQ ID NO: 413 is the determined cDNA sequence for clone 26538.

[0455] SEQ ID NO: 414 is the determined cDNA sequence for clone 26540.

[0456] SEQ ID NO: 415 is the determined cDNA sequence for clone 26541.

[0457] SEQ ID NO: 416 is the determined cDNA sequence for clone 26542.

[0458] SEQ ID NO: 417 is the determined cDNA sequence for clone 26543.

[0459] SEQ ID NO: 418 is the determined cDNA sequence for clone 26544.

[0460] SEQ ID NO: 419 is the determined cDNA sequence for clone 26546.

[0461] SEQ ID NO: 420 is the determined cDNA sequence for clone 26547.

[0462] SEQ ID NO: 421 is the determined cDNA sequence for clone 26548.

[0463] SEQ ID NO: 422 is the determined cDNA sequence for clone 26549.

[0464] SEQ ID NO: 423 is the determined cDNA sequence for clone 26550.

[0465] SEQ ID NO: 424 is the determined cDNA sequence for clone 26551.

[0466] SEQ ID NO: 425 is the determined cDNA sequence for clone 26552.

[0467] SEQ ID NO: 426 is the determined cDNA sequence for clone 26553.

[0468] SEQ ID NO: 427 is the determined cDNA sequence for clone 26554.

[0469] SEQ ID NO: 428 is the determined cDNA sequence for clone 26556.

[0470] SEQ ID NO: 429 is the determined cDNA sequence for clone 26557.

[0471] SEQ ID NO: 430 is the determined cDNA sequence for clone 27631.

[0472] SEQ ID NO: 431 is the determined cDNA sequence for clone 27632.

[0473] SEQ ID NO: 432 is the determined cDNA sequence for clone 27633.

[0474] SEQ ID NO: 433 is the determined cDNA sequence for clone 27635.

[0475] SEQ ID NO: 434 is the determined cDNA sequence for clone 27636.

[0476] SEQ ID NO: 435 is the determined cDNA sequence for clone 27637.

[0477] SEQ ID NO: 436 is the determined cDNA sequence for clone 27638.

[0478] SEQ ID NO: 437 is the determined cDNA sequence for clone 27639.

[0479] SEQ ID NO: 438 is the determined cDNA sequence for clone 27640.

[0480] SEQ ID NO: 439 is the determined cDNA sequence for clone 27641.

[0481] SEQ ID NO: 440 is the determined cDNA sequence for clone 27642.

[0482] SEQ ID NO: 441 is the determined cDNA sequence for clone 27644.

[0483] SEQ ID NO: 442 is the determined cDNA sequence for clone 27646.

[0484] SEQ ID NO: 443 is the determined cDNA sequence for clone 27647.

[0485] SEQ ID NO: 444 is the determined cDNA sequence for clone 27649.

[0486] SEQ ID NO: 445 is the determined cDNA sequence for clone 27650.

[0487] SEQ ID NO: 446 is the determined cDNA sequence for clone 27651.

[0488] SEQ ID NO: 447 is the determined cDNA sequence for clone 27652.

[0489] SEQ ID NO: 448 is the determined cDNA sequence for clone 27654.

[0490] SEQ ID NO: 449 is the determined cDNA sequence for clone 27655.

[0491] SEQ ID NO: 450 is the determined cDNA sequence for clone 27657.

[0492] SEQ ID NO: 451 is the determined cDNA sequence for clone 27659.

[0493] SEQ ID NO: 452 is the determined cDNA sequence for clone 27665.

[0494] SEQ ID NO: 453 is the determined cDNA sequence for clone 27666.

[0495] SEQ ID NO: 454 is the determined cDNA sequence for clone 27668.

[0496] SEQ ID NO: 455 is the determined cDNA sequence for clone 27670.

[0497] SEQ ID NO: 456 is the determined cDNA sequence for clone 27671.

[0498] SEQ ID NO: 457 is the determined cDNA sequence for clone 27672.

[0499] SEQ ID NO: 458 is the determined cDNA sequence for clone 27674.

[0500] SEQ ID NO: 459 is the determined cDNA sequence for clone 27677.

[0501] SEQ ID NO: 460 is the determined cDNA sequence for clone 27681.

[0502] SEQ ID NO: 461 is the determined cDNA sequence for clone 27682.

[0503] SEQ ID NO: 462 is the determined cDNA sequence for clone 27683.

[0504] SEQ ID NO: 463 is the determined cDNA sequence for clone 27686.

[0505] SEQ ID NO: 464 is the determined cDNA sequence for clone 27688.

[0506] SEQ ID NO: 465 is the determined cDNA sequence for clone 27689.

[0507] SEQ ID NO: 466 is the determined cDNA sequence for clone 27690.

[0508] SEQ ID NO: 467 is the determined cDNA sequence for clone 27693.

[0509] SEQ ID NO: 468 is the determined cDNA sequence for clone 27699.

[0510] SEQ ID NO: 469 is the determined cDNA sequence for clone 27700.

[0511] SEQ ID NO: 470 is the determined cDNA sequence for clone 27702.

[0512] SEQ ID NO: 471 is the determined cDNA sequence for clone 27705.

[0513] SEQ ID NO: 472 is the determined cDNA sequence for clone 27706.

[0514] SEQ ID NO: 473 is the determined cDNA sequence for clone 27707.

[0515] SEQ ID NO: 474 is the determined cDNA sequence for clone 27708.

[0516] SEQ ID NO: 475 is the determined cDNA sequence for clone 27709.

[0517] SEQ ID NO: 476 is the determined cDNA sequence for clone 27710.

[0518] SEQ ID NO: 477 is the determined cDNA sequence for clone 27711.

[0519] SEQ ID NO: 478 is the determined cDNA sequence for clone 27712.

[0520] SEQ ID NO: 479 is the determined cDNA sequence for clone 27713.

[0521] SEQ ID NO: 480 is the determined cDNA sequence for clone 27714.

[0522] SEQ ID NO: 481 is the determined cDNA sequence for clone 27715.

[0523] SEQ ID NO: 482 is the determined cDNA sequence for clone 27716.

[0524] SEQ ID NO: 483 is the determined cDNA sequence for clone 27717.

[0525] SEQ ID NO: 484 is the determined cDNA sequence for clone 27718.

[0526] SEQ ID NO: 485 is the determined cDNA sequence for clone 27719.

[0527] SEQ ID NO: 486 is the determined cDNA sequence for clone 27720.

[0528] SEQ ID NO: 487 is the determined cDNA sequence for clone 27722.

[0529] SEQ ID NO: 488 is the determined cDNA sequence for clone 27723.

[0530] SEQ ID NO: 489 is the determined cDNA sequence for clone 27724.

[0531] SEQ ID NO: 490 is the determined cDNA sequence for clone 27726.

[0532] SEQ ID NO: 491 is the determined cDNA sequence for clone 25015.

[0533] SEQ ID NO: 492 is the determined cDNA sequence for clone 25016.

[0534] SEQ ID NO: 493 is the determined cDNA sequence for clone 25017.

[0535] SEQ ID NO: 494 is the determined cDNA sequence for clone 25018

[0536] SEQ ID NO: 495 is the determined cDNA sequence for clone 25030.

[0537] SEQ ID NO: 496 is the determined cDNA sequence for clone 25033.

[0538] SEQ ID NO: 497 is the determined cDNA sequence for clone 25034.

[0539] SEQ ID NO: 498 is the determined cDNA sequence for clone 25035.

[0540] SEQ ID NO: 499 is the determined cDNA sequence for clone 25036.

[0541] SEQ ID NO: 500 is the determined cDNA sequence for clone 25037.

[0542] SEQ ID NO: 501 is the determined cDNA sequence for clone 25038.

[0543] SEQ ID NO: 502 is the determined cDNA sequence for clone 25039.

[0544] SEQ ID NO: 503 is the determined cDNA sequence for clone 25040.

[0545] SEQ ID NO: 504 is the determined cDNA sequence for clone 25042.

[0546] SEQ ID NO: 505 is the determined cDNA sequence for clone 25043.

[0547] SEQ ID NO: 506 is the determined cDNA sequence for clone 25044.

[0548] SEQ ID NO: 507 is the determined cDNA sequence for clone 25045.

[0549] SEQ ID NO: 508 is the determined cDNA sequence for clone 25047.

[0550] SEQ ID NO: 509 is the determined cDNA sequence for clone 25048.

[0551] SEQ ID NO: 510 is the determined cDNA sequence for clone 25049.

[0552] SEQ ID NO: 511 is the determined cDNA sequence for clone 25185.

[0553] SEQ ID NO: 512 is the determined cDNA sequence for clone 25186.

[0554] SEQ ID NO: 513 is the determined cDNA sequence for clone 25187.

[0555] SEQ ID NO: 514 is the determined cDNA sequence for clone 25188.

[0556] SEQ ID NO: 515 is the determined cDNA sequence for clone 25189.

[0557] SEQ ID NO: 516 is the determined cDNA sequence for clone 25190.

[0558] SEQ ID NO: 517 is the determined cDNA sequence for clone 25193.

[0559] SEQ ID NO: 518 is the determined cDNA sequence for clone 25194.

[0560] SEQ ID NO: 519 is the determined cDNA sequence for clone 25196.

[0561] SEQ ID NO: 520 is the determined cDNA sequence for clone 25198.

[0562] SEQ ID NO: 521 is the determined cDNA sequence for clone 25199.

[0563] SEQ ID NO: 522 is the determined cDNA sequence for clone 25200.

[0564] SEQ ID NO: 523 is the determined cDNA sequence for clone 25202.

[0565] SEQ ID NO: 524 is the determined cDNA sequence for clone 25364.

[0566] SEQ ID NO: 525 is the determined cDNA sequence for clone 25366.

[0567] SEQ ID NO: 526 is the determined cDNA sequence for clone 25367.

[0568] SEQ ID NO: 527 is the determined cDNA sequence for clone 25368.

[0569] SEQ ID NO: 528 is the determined cDNA sequence for clone 25369.

[0570] SEQ ID NO: 529 is the determined cDNA sequence for clone 25370.

[0571] SEQ ID NO: 530 is the determined cDNA sequence for clone 25371.

[0572] SEQ ID NO: 531 is the determined cDNA sequence for clone 25372.

[0573] SEQ ID NO: 532 is the determined cDNA sequence for clone 25373.

[0574] SEQ ID NO: 533 is the determined cDNA sequence for clone 25374.

[0575] SEQ ID NO: 534 is the determined cDNA sequence for clone 25376.

[0576] SEQ ID NO: 535 is the determined cDNA sequence for clone 25377.

[0577] SEQ ID NO: 536 is the determined cDNA sequence for clone 25378.

[0578] SEQ ID NO: 537 is the determined cDNA sequence for clone 25379.

[0579] SEQ ID NO: 538 is the determined cDNA sequence for clone 25380.

[0580] SEQ ID NO: 539 is the determined cDNA sequence for clone 25381.

[0581] SEQ ID NO: 540 is the determined cDNA sequence for clone 25382.

[0582] SEQ ID NO: 541 is the determined cDNA sequence for clone 25383.

[0583] SEQ ID NO: 542 is the determined cDNA sequence for clone 25385.

[0584] SEQ ID NO: 543 is the determined cDNA sequence for clone 25386.

[0585] SEQ ID NO: 544 is the determined cDNA sequence for clone 25387.

[0586] SEQ ID NO: 545 is the determined cDNA sequence for clone 26013.

[0587] SEQ ID NO: 546 is the determined cDNA sequence for clone 26014.

[0588] SEQ ID NO: 547 is the determined cDNA sequence for clone 26016.

[0589] SEQ ID NO: 548 is the determined cDNA sequence for clone 26017.

[0590] SEQ ID NO: 549 is the determined cDNA sequence for clone 26018.

[0591] SEQ ID NO: 550 is the determined cDNA sequence for clone 26019.

[0592] SEQ ID NO: 551 is the determined cDNA sequence for clone 26020.

[0593] SEQ ID NO: 552 is the determined cDNA sequence for clone 26021.

[0594] SEQ ID NO: 553 is the determined cDNA sequence for clone 26022.

[0595] SEQ ID NO: 554 is the determined cDNA sequence for clone 26027.

[0596] SEQ ID NO: 555 is the determined cDNA sequence for clone 26197.

[0597] SEQ ID NO: 556 is the determined cDNA sequence for clone 26199.

[0598] SEQ ID NO: 557 is the determined cDNA sequence for clone 26201.

[0599] SEQ ID NO: 558 is the determined cDNA sequence for clone 26202.

[0600] SEQ ID NO: 559 is the determined cDNA sequence for clone 26203.

[0601] SEQ ID NO: 560 is the determined cDNA sequence for clone 26204.

[0602] SEQ ID NO: 561 is the determined cDNA sequence for clone 26205.

[0603] SEQ ID NO: 562 is the determined cDNA sequence for clone 26206.

[0604] SEQ ID NO: 563 is the determined cDNA sequence for clone 26208.

[0605] SEQ ID NO: 564 is the determined cDNA sequence for clone 26211.

[0606] SEQ ID NO: 565 is the determined cDNA sequence for clone 26212.

[0607] SEQ ID NO: 566 is the determined cDNA sequence for clone 26213.

[0608] SEQ ID NO: 567 is the determined cDNA sequence for clone 26214.

[0609] SEQ ID NO: 568 is the determined cDNA sequence for clone 26215.

[0610] SEQ ID NO: 569 is the determined cDNA sequence for clone 26216.

[0611] SEQ ID NO: 570 is the determined cDNA sequence for clone 26217.

[0612] SEQ ID NO: 571 is the determined cDNA sequence for clone 26218.

[0613] SEQ ID NO: 572 is the determined cDNA sequence for clone 26219.

[0614] SEQ ID NO: 573 is the determined cDNA sequence for clone 26220.

[0615] SEQ ID NO: 574 is the determined cDNA sequence for clone 26221.

[0616] SEQ ID NO: 575 is the determined cDNA sequence for clone 26224.

[0617] SEQ ID NO: 576 is the determined cDNA sequence for clone 26225.

[0618] SEQ ID NO: 577 is the determined cDNA sequence for clone 26226.

[0619] SEQ ID NO: 578 is the determined cDNA sequence for clone 26227.

[0620] SEQ ID NO: 579 is the determined cDNA sequence for clone 26228.

[0621] SEQ ID NO: 580 is the determined cDNA sequence for clone 26230.

[0622] SEQ ID NO: 581 is the determined cDNA sequence for clone 26231.

[0623] SEQ ID NO: 582 is the determined cDNA sequence for clone 26234.

[0624] SEQ ID NO: 583 is the determined cDNA sequence for clone 26236.

[0625] SEQ ID NO: 584 is the determined cDNA sequence for clone 26237.

[0626] SEQ ID NO: 585 is the determined cDNA sequence for clone 26239.

[0627] SEQ ID NO: 586 is the determined cDNA sequence for clone 26240.

[0628] SEQ ID NO: 587 is the determined cDNA sequence for clone 26241.

[0629] SEQ ID NO: 588 is the determined cDNA sequence for clone 26242.

[0630] SEQ ID NO: 589 is the determined cDNA sequence for clone 26246.

[0631] SEQ ID NO: 590 is the determined cDNA sequence for clone 26247.

[0632] SEQ ID NO: 591 is the determined cDNA sequence for clone 26248.

[0633] SEQ ID NO: 592 is the determined cDNA sequence for clone 26249.

[0634] SEQ ID NO: 593 is the determined cDNA sequence for clone 26250.

[0635] SEQ ID NO: 594 is the determined cDNA sequence for clone 26251.

[0636] SEQ ID NO: 595 is the determined cDNA sequence for clone 26252.

[0637] SEQ ID NO: 596 is the determined cDNA sequence for clone 26253.

[0638] SEQ ID NO: 597 is the determined cDNA sequence for clone 26254.

[0639] SEQ ID NO: 598 is the determined cDNA sequence for clone 26255.

[0640] SEQ ID NO: 599 is the determined cDNA sequence for clone 26256.

[0641] SEQ ID NO: 600 is the determined cDNA sequence for clone 26257.

[0642] SEQ ID NO: 601 is the determined cDNA sequence for clone 26259.

[0643] SEQ ID NO: 602 is the determined cDNA sequence for clone 26260.

[0644] SEQ ID NO: 603 is the determined cDNA sequence for clone 26261.

[0645] SEQ ID NO: 604 is the determined cDNA sequence for clone 26262.

[0646] SEQ ID NO: 605 is the determined cDNA sequence for clone 26263.

[0647] SEQ ID NO: 606 is the determined cDNA sequence for clone 26264.

[0648] SEQ ID NO: 607 is the determined cDNA sequence for clone 26265.

[0649] SEQ ID NO: 608 is the determined cDNA sequence for clone 26266.

[0650] SEQ ID NO: 609 is the determined cDNA sequence for clone 26268.

[0651] SEQ ID NO: 610 is the determined cDNA sequence for clone 26269.

[0652] SEQ ID NO: 611 is the determined cDNA sequence for clone 26271.

[0653] SEQ ID NO: 612 is the determined cDNA sequence for clone 26273.

[0654] SEQ ID NO: 613 is the determined cDNA sequence for clone 26810.

[0655] SEQ ID NO: 614 is the determined cDNA sequence for clone 26811.

[0656] SEQ ID NO: 615 is the determined cDNA sequence for clone 26812.1.

[0657] SEQ ID NO: 616 is the determined cDNA sequence for clone 26812.2.

[0658] SEQ ID NO: 617 is the determined cDNA sequence for clone 26813.

[0659] SEQ ID NO: 618 is the determined cDNA sequence for clone 26814.

[0660] SEQ ID NO: 619 is the determined cDNA sequence for clone 26815.

[0661] SEQ ID NO: 620 is the determined cDNA sequence for clone 26816.

[0662] SEQ ID NO: 621 is the determined cDNA sequence for clone 26818.

[0663] SEQ ID NO: 622 is the determined cDNA sequence for clone 26819.

[0664] SEQ ID NO: 623 is the determined cDNA sequence for clone 26820.

[0665] SEQ ID NO: 624 is the determined cDNA sequence for clone 26821.

[0666] SEQ ID NO: 625 is the determined cDNA sequence for clone 26822.

[0667] SEQ ID NO: 626 is the determined cDNA sequence for clone 26824.

[0668] SEQ ID NO: 627 is the determined cDNA sequence for clone 26825.

[0669] SEQ ID NO: 628 is the determined cDNA sequence for clone 26826.

[0670] SEQ ID NO: 629 is the determined cDNA sequence for clone 26827.

[0671] SEQ ID NO: 630 is the determined cDNA sequence for clone 26829.

[0672] SEQ ID NO: 631 is the determined cDNA sequence for clone 26830.

[0673] SEQ ID NO: 632 is the determined cDNA sequence for clone 26831.

[0674] SEQ ID NO: 633 is the determined cDNA sequence for clone 26832.

[0675] SEQ ID NO: 634 is the determined cDNA sequence for clone 26835.

[0676] SEQ ID NO: 635 is the determined cDNA sequence for clone 26836.

[0677] SEQ ID NO: 636 is the determined cDNA sequence for clone 26837.

[0678] SEQ ID NO: 637 is the determined cDNA sequence for clone 26839.

[0679] SEQ ID NO: 638 is the determined cDNA sequence for clone 26841.

[0680] SEQ ID NO: 639 is the determined cDNA sequence for clone 26843.

[0681] SEQ ID NO: 640 is the determined cDNA sequence for clone 26844.

[0682] SEQ ID NO: 641 is the determined cDNA sequence for clone 26845.

[0683] SEQ ID NO: 642 is the determined cDNA sequence for clone 26846.

[0684] SEQ ID NO: 643 is the determined cDNA sequence for clone 26847.

[0685] SEQ ID NO: 644 is the determined cDNA sequence for clone 26848.

[0686] SEQ ID NO: 645 is the determined cDNA sequence for clone 26849.

[0687] SEQ ID NO: 646 is the determined cDNA sequence for clone 26850.

[0688] SEQ ID NO: 647 is the determined cDNA sequence for clone 26851.

[0689] SEQ ID NO: 648 is the determined cDNA sequence for clone 26852.

[0690] SEQ ID NO: 649 is the determined cDNA sequence for clone 26853.

[0691] SEQ ID NO: 650 is the determined cDNA sequence for clone 26854.

[0692] SEQ ID NO: 651 is the determined cDNA sequence for clone 26856.

[0693] SEQ ID NO: 652 is the determined cDNA sequence for clone 26857.

[0694] SEQ ID NO: 653 is the determined cDNA sequence for clone 26858.

[0695] SEQ ID NO: 654 is the determined cDNA sequence for clone 26859.

[0696] SEQ ID NO: 655 is the determined cDNA sequence for clone 26860.

[0697] SEQ ID NO:656 is the determined cDNA sequence for clone 26862.

[0698] SEQ ID NO: 657 is the determined cDNA sequence for clone 26863.

[0699] SEQ ID NO: 658 is the determined cDNA sequence for clone 26864.

[0700] SEQ ID NO: 659 is the determined cDNA sequence for clone 26865.

[0701] SEQ ID NO: 660 is the determined cDNA sequence for clone 26867.

[0702] SEQ ID NO: 661 is the determined cDNA sequence for clone 26868.

[0703] SEQ ID NO: 662 is the determined cDNA sequence for clone 26871.

[0704] SEQ ID NO: 663 is the determined cDNA sequence for clone 26873.

[0705] SEQ ID NO: 664 is the determined cDNA sequence for clone 26875.

[0706] SEQ ID NO: 665 is the determined cDNA sequence for clone 26876.

[0707] SEQ ID NO: 666 is the determined cDNA sequence for clone 26877.

[0708] SEQ ID NO: 667 is the determined cDNA sequence for clone 26878.

[0709] SEQ ID NO: 668 is the determined cDNA sequence for clone 26880.

[0710] SEQ ID NO: 669 is the determined cDNA sequence for clone 26882.

[0711] SEQ ID NO: 670 is the determined cDNA sequence for clone 26883.

[0712] SEQ ID NO: 671 is the determined cDNA sequence for clone 26884.

[0713] SEQ ID NO: 672 is the determined cDNA sequence for clone 26885.

[0714] SEQ ID NO: 673 is the determined cDNA sequence for clone 26886.

[0715] SEQ ID NO: 674 is the determined cDNA sequence for clone 26887.

[0716] SEQ ID NO: 675 is the determined cDNA sequence for clone 26888.

[0717] SEQ ID NO: 676 is the determined cDNA sequence for clone 26889.

[0718] SEQ ID NO: 677 is the determined cDNA sequence for clone 26890.

[0719] SEQ ID NO: 678 is the determined cDNA sequence for clone 26892.

[0720] SEQ ID NO: 679 is the determined cDNA sequence for clone 26894.

[0721] SEQ ID NO: 680 is the determined cDNA sequence for clone 26895.

[0722] SEQ ID NO: 681 is the determined cDNA sequence for clone 26897.

[0723] SEQ ID NO: 682 is the determined cDNA sequence for clone 26898.

[0724] SEQ ID NO: 683 is the determined cDNA sequence for clone 26899.

[0725] SEQ ID NO: 684 is the determined cDNA sequence for clone 26900.

[0726] SEQ ID NO: 685 is the determined cDNA sequence for clone 26901.

[0727] SEQ ID NO: 686 is the determined cDNA sequence for clone 26903.

[0728] SEQ ID NO: 687 is the determined cDNA sequence for clone 26905.

[0729] SEQ ID NO: 688 is the determined cDNA sequence for clone 26906.

[0730] SEQ ID NO: 689 is the determined cDNA sequence for clone 26708.

[0731] SEQ ID NO: 690 is the determined cDNA sequence for clone 26709.

[0732] SEQ ID NO: 691 is the determined cDNA sequence for clone 26710.

[0733] SEQ ID NO: 692 is the determined cDNA sequence for clone 26711.

[0734] SEQ ID NO: 693 is the determined cDNA sequence for clone 26712.

[0735] SEQ ID NO: 694 is the determined cDNA sequence for clone 26713.

[0736] SEQ ID NO: 695 is the determined cDNA sequence for clone 26714.

[0737] SEQ ID NO: 696 is the determined cDNA sequence for clone 26715.

[0738] SEQ ID NO: 697 is the determined cDNA sequence for clone 26716.

[0739] SEQ ID NO: 698 is the determined cDNA sequence for clone 26717.

[0740] SEQ ID NO: 699 is the determined cDNA sequence for clone 26718.

[0741] SEQ ID NO: 700 is the determined cDNA sequence for clone 26719.

[0742] SEQ ID NO: 701 is the determined cDNA sequence for clone 26720.

[0743] SEQ ID NO: 702 is the determined cDNA sequence for clone 26721.

[0744] SEQ ID NO: 703 is the determined cDNA sequence for clone 26722.

[0745] SEQ ID NO: 704 is the determined cDNA sequence for clone 26723.

[0746] SEQ ID NO: 705 is the determined cDNA sequence for clone 26724.

[0747] SEQ ID NO: 706 is the determined cDNA sequence for clone 26725.

[0748] SEQ ID NO: 707 is the determined cDNA sequence for clone 26726.

[0749] SEQ ID NO: 708 is the determined cDNA sequence for clone 26727.

[0750] SEQ ID NO: 709 is the determined cDNA sequence for clone 26728.

[0751] SEQ ID NO: 710 is the determined cDNA sequence for clone 26729.

[0752] SEQ ID NO: 711 is the determined cDNA sequence for clone 26730.

[0753] SEQ ID NO: 712 is the determined cDNA sequence for clone 26731.

[0754] SEQ ID NO: 713 is the determined cDNA sequence for clone 26732.

[0755] SEQ ID NO: 714 is the determined cDNA sequence for clone 26733.1.

[0756] SEQ ID NO: 715 is the determined cDNA sequence for clone 26733.2.

[0757] SEQ ID NO: 716 is the determined cDNA sequence for clone 26734.

[0758] SEQ ID NO: 717 is the determined cDNA sequence for clone 26735.

[0759] SEQ ID NO: 718 is the determined cDNA sequence for clone 26736.

[0760] SEQ ID NO: 719 is the determined cDNA sequence for clone 26737.

[0761] SEQ ID NO: 720 is the determined cDNA sequence for clone 26738.

[0762] SEQ ID NO: 721 is the determined cDNA sequence for clone 26739.

[0763] SEQ ID NO: 722 is the determined cDNA sequence for clone 26741.

[0764] SEQ ID NO: 723 is the determined cDNA sequence for clone 26742.

[0765] SEQ ID NO: 724 is the determined cDNA sequence for clone 26743.

[0766] SEQ ID NO: 725 is the determined cDNA sequence for clone 26744.

[0767] SEQ ID NO: 726 is the determined cDNA sequence for clone 26745.

[0768] SEQ ID NO: 727 is the determined cDNA sequence for clone 26746.

[0769] SEQ ID NO: 728 is the determined cDNA sequence for clone 26747.

[0770] SEQ ID NO: 729 is the determined cDNA sequence for clone 26748.

[0771] SEQ ID NO: 730 is the determined cDNA sequence for clone 26749.

[0772] SEQ ID NO: 731 is the determined cDNA sequence for clone 26750.

[0773] SEQ ID NO: 732 is the determined cDNA sequence for clone 26751.

[0774] SEQ ID NO: 733 is the determined cDNA sequence for clone 26752.

[0775] SEQ ID NO: 734 is the determined cDNA sequence for clone 26753.

[0776] SEQ ID NO: 735 is the determined cDNA sequence for clone 26754.

[0777] SEQ ID NO: 736 is the determined cDNA sequence for clone 26755.

[0778] SEQ ID NO: 737 is the determined cDNA sequence for clone 26756.

[0779] SEQ ID NO: 738 is the determined cDNA sequence for clone 26757.

[0780] SEQ ID NO: 739 is the determined cDNA sequence for clone 26758.

[0781] SEQ ID NO: 740 is the determined cDNA sequence for clone 26759.

[0782] SEQ ID NO: 741 is the determined cDNA sequence for clone 26760.

[0783] SEQ ID NO: 742 is the determined cDNA sequence for clone 26761.

[0784] SEQ ID NO: 743 is the determined cDNA sequence for clone 26762.

[0785] SEQ ID NO: 744 is the determined cDNA sequence for clone 26763.

[0786] SEQ ID NO: 745 is the determined cDNA sequence for clone 26764.

[0787] SEQ ID NO: 746 is the determined cDNA sequence for clone 26765.

[0788] SEQ ID NO: 747 is the determined cDNA sequence for clone 26766.

[0789] SEQ ID NO: 748 is the determined cDNA sequence for clone 26767.

[0790] SEQ ID NO: 749 is the determined cDNA sequence for clone 26768.

[0791] SEQ ID NO: 750 is the determined cDNA sequence for clone 26769.

[0792] SEQ ID NO: 751 is the determined cDNA sequence for clone 26770.

[0793] SEQ ID NO: 752 is the determined cDNA sequence for clone 26771.

[0794] SEQ ID NO: 753 is the determined cDNA sequence for clone 26772.

[0795] SEQ ID NO: 754 is the determined cDNA sequence for clone 26773.

[0796] SEQ ID NO: 755 is the determined cDNA sequence for clone 26774.

[0797] SEQ ID NO: 756 is the determined cDNA sequence for clone 26775.

[0798] SEQ ID NO: 757 is the determined cDNA sequence for clone 26776.

[0799] SEQ ID NO: 758 is the determined cDNA sequence for clone 26777.

[0800] SEQ ID NO: 759 is the determined cDNA sequence for clone 26778.

[0801] SEQ ID NO: 760 is the determined cDNA sequence for clone 26779.

[0802] SEQ ID NO: 761 is the determined cDNA sequence for clone 26781.

[0803] SEQ ID NO: 762 is the determined cDNA sequence for clone 26782.

[0804] SEQ ID NO: 763 is the determined cDNA sequence for clone 26783.

[0805] SEQ ID NO: 764 is the determined cDNA sequence for clone 26784.

[0806] SEQ ID NO: 765 is the determined cDNA sequence for clone 26785.

[0807] SEQ ID NO: 766 is the determined cDNA sequence for clone 26786.

[0808] SEQ ID NO: 767 is the determined cDNA sequence for clone 26787.

[0809] SEQ ID NO: 768 is the determined cDNA sequence for clone 26788.

[0810] SEQ ID NO: 769 is the determined cDNA sequence for clone 26790.

[0811] SEQ ID NO: 770 is the determined cDNA sequence for clone 26791.

[0812] SEQ ID NO: 771 is the determined cDNA sequence for clone 26792.

[0813] SEQ ID NO: 772 is the determined cDNA sequence for clone 26793.

[0814] SEQ ID NO: 773 is the determined cDNA sequence for clone 26794.

[0815] SEQ ID NO: 774 is the determined cDNA sequence for clone 26795.

[0816] SEQ ID NO: 775 is the determined cDNA sequence for clone 26796.

[0817] SEQ ID NO: 776 is the determined cDNA sequence for clone 26797.

[0818] SEQ ID NO: 777 is the determined cDNA sequence for clone 26798.

[0819] SEQ ID NO: 778 is the determined cDNA sequence for clone 26800.

[0820] SEQ ID NO: 779 is the determined cDNA sequence for clone 26801.

[0821] SEQ ID NO: 780 is the determined cDNA sequence for clone 26802.

[0822] SEQ ID NO: 781 is the determined cDNA sequence for clone 26803.

[0823] SEQ ID NO: 782 is the determined cDNA sequence for clone 26804.

[0824] SEQ ID NO:783 is the amino acid sequence for L773P.

[0825] SEQ ID NO:784 is the determined DNA sequence of the L773P expression construct.

[0826] SEQ ID NO:785 is the determined DNA sequence of the L773PA expression construct.

[0827] SEQ ID NO: 786 is a predicted amino acid sequence for L5526.

[0828] SEQ ID NO: 787 is a predicted amino acid sequence for L840P.

[0829] SEQ ID NO: 788 is the full-length cDNA sequence for L548S.

[0830] SEQ ID NO: 789 is the amino acid sequence encoded by SEQ ID NO: 788.

[0831] SEQ ID NO: 790 is an extended cDNA sequence for L552S.

[0832] SEQ ID NO: 791 is the predicted amino acid sequence encoded by the cDNA sequence of SEQ ID NO: 790.

[0833] SEQ ID NO: 792 is the determined cDNA sequence for an isoform of L552S.

[0834] SEQ ID NO: 793 is the predicted amino acid sequence encoded by SEQ ID NO: 792.

[0835] SEQ ID NO: 794 is an extended cDNA sequence for L840P.

[0836] SEQ ID NO: 795 is the predicted amino acid sequence encoded by SEQ DI NO: 794.

[0837] SEQ ID NO: 796 is an extended cDNA sequence for L801P.

[0838] SEQ ID NO: 797 is a first predicted amino acid sequence encoded by SEQ ID NO: 796.

[0839] SEQ ID NO: 798 is a second predicted amino acid sequence encoded by SEQ ID NO: 796.

[0840] SEQ ID NO: 799 is a third predicted amino acid sequence encoded by SEQ ID NO: 796.

[0841] SEQ ID NO: 800 is the determined full-length sequence for L844P.

[0842] SEQ ID NO: 801 is the 5′ consensus cDNA sequence for L551S.

[0843] SEQ ID NO: 802 is the 3′ consensus cDNA sequence for L551S.

[0844] SEQ ID NO: 803 is the cDNA sequence for STY8.

[0845] SEQ ID NO: 804 is an extended cDNA sequence for L551S.

[0846] SEQ ID NO: 805 is the amino acid sequence for STY8.

[0847] SEQ ID NO: 806 is the extended amino acid sequence for L551S.

[0848] SEQ ID NO:807 is the determined full length cDNA sequence for L773P.

[0849] SEQ ID NO: 808 is the full-length cDNA sequence of L552S.

[0850] SEQ ID NO: 809 is the full-length amino acid sequence of L552S.

[0851] SEQ ID NO: 810 is the determined cDNA sequence of clone 50989.

[0852] SEQ ID NO: 811 is the determined cDNA sequence of clone 50990.

[0853] SEQ ID NO: 812 is the determined cDNA sequence of clone 50992.

[0854] SEQ ID NO: 813-824 are the determined cDNA sequences for clones isolated from lung tumor tissue.

[0855] SEQ ID NO: 825 is the determined cDNA sequence for the full-length L551S clone 54305.

[0856] SEQ ID NO: 826 is the determined cDNA sequence for the full-length L55 IS clone 54298.

[0857] SEQ ID NO: 827 is the full-length amino acid sequence for L551S.

[0858] Tables 1-6 contain the sequence identifiers for SEQ ID NO:828-1664.

TABLE 1A

| | CLONE |
|---|---|
| SEQ ID NO: | IDENTIFIER |
| 828 | R0126:A02 |
| 829 | R0126:A03 |
| 830 | R0126:A05 |
| 831 | R0126:A06 |
| 832 | R0126:A08 |
| 833 | R0126:A09 |
| 834 | R0126:A10 |
| 835 | R0126:A11 |
| 836 | R0126:A12 |
| 837 | R0126:B01 |
| 838 | R0126:B03 |
| 839 | R0126:B04 |
| 840 | R0126:B05 |
| 841 | R0126:B06 |
| 842 | R0126:B07 |
| 843 | R0126:B08 |
| 844 | R0126:B09 |
| 845 | R0126:B11 |
| 846 | R0126:B12 |
| 847 | R0126:C01 |
| 848 | R0126:C02 |
| 849 | R0126:C03 |
| 850 | R0126:C05 |
| 851 | R0126:C06 |
| 852 | R0126:C07 |
| 853 | R0126:C08 |
| 854 | R0126:C09 |
| 855 | R0126:C10 |
| 856 | R0126:C11 |
| 857 | R0126:C12 |
| 858 | R0126:D01 |
| 859 | R0126:D02 |
| 860 | R0126:D03 |
| 861 | R0126:D04 |
| 862 | R0126:D05 |
| 863 | R0126:D06 |
| 864 | R0126:D07 |
| 865 | R0126:D08 |
| 866 | R0126:D09 |
| 867 | R0126:D10 |
| 868 | R0126:D11 |
| 869 | R0126:D12 |
| 870 | R0126:E01 |
| 871 | R0126:E02 |
| 872 | R0126:E03 |
| 873 | R0126:E04 |
| 874 | R0126:E05 |
| 875 | R0126:E06 |
| 876 | R0126:E07 |
| 877 | R0126:E08 |
| 878 | R0126:E09 |
| 879 | R0126:E10 |
| 880 | R0126:E1l |
| 881 | R0126:E12 |
| 882 | R0126:F0l |
| 883 | R0126:F02 |
| 884 | R0126:F03 |
| 885 | R0126:F04 |
| 886 | R0126:F05 |
| 887 | R0126:F06 |
| 888 | R0126:F07 |
| 889 | R0126:F08 |
| 890 | R0126:F10 |
| 891 | R0126:F11 |
| 892 | R0126:F12 |
| 893 | R0126:G01 |
| 894 | R0126:G02 |
| 895 | R0126:G03 |
| 896 | R0126:G04 |
| 897 | R0126:G05 |
| 898 | R0126:G06 |
| 899 | R0126:G07 |
| 900 | R0126:G09 |
| 901 | R0126:G10 |
| 902 | R0126:G11 |
| 903 | R0126:G12 |
| 904 | R0126:H01 |
| 905 | R0126:H02 |
| 906 | R0126:H03 |
| 907 | R0126:H04 |
| 908 | R0126:H05 |
| 909 | R0126:H06 |

[0859] TABLE 1B

| | CLONE |
|---|---|
| SEQ ID NO | IDENTIFIER |
| 910 | R0126:H07 |
| 911 | R0126:H09 |
| 912 | R0126:H10 |
| 913 | R0126:H11 |
| 914 | R0127:A02 |
| 915 | R0127:A05 |
| 916 | R0127:A06 |
| 917 | R0127:A07 |
| 918 | R0127:A08 |
| 919 | R0127:A09 |
| 920 | R0127:A10 |
| 921 | R0127:A11 |
| 922 | R0127:A12 |
| 923 | R0127:B01 |
| 924 | R0127:B03 |
| 925 | R0127:B04 |
| 926 | R0127:B05 |
| 927 | R0127:B06 |
| 928 | R0127:B07 |
| 929 | R0127:B08 |
| 930 | R0127:B09 |
| 931 | R0127:B10 |
| 932 | R0127:B11 |
| 933 | R0127:B12 |
| 934 | R0127:C01 |
| 935 | R0127:C03 |
| 936 | R0127:C04 |
| 937 | R0127:C05 |
| 938 | R0127:C07 |
| 939 | R0127:C08 |
| 940 | R0127:C09 |
| 941 | R0127:C10 |
| 942 | R0127:C11 |
| 943 | R0127:D01 |
| 944 | R0127:D02 |
| 945 | R0127:D03 |
| 946 | R0127:D04 |
| 947 | R0127:D05 |
| 948 | R0127:D06 |
| 949 | R0127:D07 |
| 950 | R0127:D01 |
| 951 | R0127:D10 |
| 952 | R0127:D11 |
| 953 | R0127:D12 |
| 954 | R0127.E02 |
| 955 | R0127:E03 |
| 956 | R0127:E04 |
| 957 | R0127:E05 |
| 958 | R0127:E06 |
| 959 | R0127:E07 |
| 960 | R0127:E08 |
| 961 | R0127:E09 |
| 962 | R0127:E10 |
| 963 | R0127:E11 |
| 964 | R0127:F01 |
| 965 | R0127:F02 |
| 966 | R0127:F03 |
| 967 | R0127:F04 |
| 968 | R0127:F05 |
| 969 | R0127:F06 |
| 970 | R0127.F07 |
| 971 | R0127:F08 |
| 972 | R0127:F10 |
| 973 | R0127:F11 |
| 974 | R0127:F12 |
| 975 | R0127:G01 |
| 976 | R0127:G02 |
| 977 | R0127:G03 |
| 978 | R0127:G04 |
| 979 | R0127:G05 |
| 980 | R0127:G06 |
| 981 | R0127:G07 |
| 982 | R0127:G08 |
| 983 | R0127:G09 |
| 984 | R0127:G10 |
| 985 | R0127:G11 |
| 986 | R0127:G12 |
| 987 | R0127:H01 |
| 988 | R0127:H02 |
| 989 | R0127:H03 |
| 990 | R0127:H04 |
| 991 | R0127:H05 |

[0860] TABLE 1C

| | CLONE |
|---|---|
| SEQ ID NO | IDENTIFIER |
| 992 | R0127:H06 |
| 993 | R0127:H07 |
| 994 | R0127:H08 |
| 995 | R1027:H09 |
| 996 | R1027:H10 |
| 997 | R1027:H11 |
| 998 | R1028:A02 |
| 999 | R1028:A05 |
| 1000 | R1028:A06 |
| 1001 | R1028:A07 |
| 1002 | R1028:A08 |
| 1003 | R1028:A09 |
| 1004 | R1028:A10 |
| 1005 | R1028:B01 |
| 1006 | R1028:B02 |
| 1007 | R1028:B03 |
| 1008 | R1028:B04 |
| 1009 | R1028:B05 |
| 1010 | R1028:B08 |
| 1011 | R1028:B09 |
| 1012 | R1028:B10 |
| 1013 | R1028:B11 |
| 1014 | R1028:B12 |
| 1015 | R1028:C01 |
| 1016 | R1028:C03 |
| 1017 | R1028:C04 |
| 1018 | R1028:C05 |
| 1019 | R1028:C06 |
| 1020 | R1028:C07 |
| 1021 | R1028:C08 |
| 1022 | R1028:C10 |
| 1023 | R1028:C11 |
| 1024 | R1028:C12 |
| 1025 | R1028:D01 |
| 1026 | R1028:D02 |
| 1027 | R1028:D04 |
| 1028 | R1028:D05 |
| 1029 | R1028:D06 |
| 1030 | R1028:D07 |
| 1031 | R1028:D08 |
| 1032 | R1028:D09 |
| 1033 | R0128:D10 |
| 1034 | R0128:D11 |
| 1035 | R0128:D12 |
| 1036 | R0128:E01 |
| 1037 | R0128:E02 |
| 1038 | R0128:E03 |
| 1039 | R0128:E04 |
| 1040 | R0128:E05 |
| 1041 | R0128:E06 |
| 1042 | R0128:E07 |
| 1043 | R0128:E08 |
| 1044 | R0128:E09 |
| 1045 | R0128:E10 |
| 1046 | R0128:E12 |
| 1047 | R0128:F01 |
| 1048 | R0128:F02 |
| 1049 | R0128:F03 |
| 1050 | R0128:F04 |
| 1051 | R0128:F06 |
| 1052 | R0128:F07 |
| 1053 | R0128:F08 |
| 1054 | R0128:F09 |
| 1055 | R0128:F10 |
| 1056 | R0128:F12 |
| 1057 | R0128:G01 |
| 1058 | R0128:G02 |
| 1059 | R0128:G03 |
| 1060 | R0128:G04 |
| 1061 | R0128:G05 |
| 1062 | R0128:G06 |
| 1063 | R0128:G07 |
| 1064 | R0128:G09 |
| 1065 | R0128:G10 |
| 1066 | R0128:G11 |
| 1067 | R0128:G12 |
| 1068 | R0128:H01 |
| 1069 | R0128:H02 |
| 1070 | R0128:H03 |
| 1071 | R0128:H04 |
| 1072 | R0128:H05 |
| 1073 | R0128:H06 |
| 1074 | R0128:H07 |
| 1075 | R0128:H08 |

[0861] TABLE 1D

| | CLONE |
|---|---|
| SEQ ID NO | IDENTIFIER |
| 1076 | R0128:H09 |
| 1077 | R0128:H10 |
| 1078 | R0128:H11 |
| 1079 | R0130:A02 |
| 1080 | R0130:A05 |
| 1081 | R0130:A06 |
| 1082 | R0130:A08 |
| 1083 | R0130:A09 |
| 1084 | R0130:A10 |
| 1085 | R0130:A11 |
| 1086 | R0130:A12 |
| 1087 | R0130:B01 |
| 1088 | R0130:B02 |
| 1089 | R0130:B03 |
| 1090 | R0130:B04 |
| 1091 | R0130:B05 |
| 1092 | R0130:B06 |
| 1093 | R0130:B08 |
| 1094 | R0130:B09 |
| 1095 | R0130:B10 |
| 1096 | R0130:B11 |
| 1097 | R0130:B12 |
| 1098 | R0130:C02 |
| 1099 | R0130:C03 |
| 1100 | R0130:C04 |
| 1101 | R0130:C05 |
| 1102 | R0130:C06 |
| 1103 | R0130:C07 |
| 1104 | R0130:C08 |
| 1105 | R0130:C09 |
| 1106 | R0130:C10 |
| 1107 | R0130:C11 |
| 1108 | R0130:C12 |
| 1109 | R0130:D02 |
| 1110 | R0130:D03 |
| 1111 | R0130:D04 |
| 1112 | R0130:D05 |
| 1113 | R0130:D06 |
| 1114 | R0130:D07 |
| 1115 | R0130:D09 |
| 1116 | R0130:D10 |
| 1117 | R0130:D11 |
| 1118 | R0130:D12 |
| 1119 | R0130:E01 |
| 1120 | R0130:E02 |
| 1121 | R0130:E03 |
| 1122 | R0130:E04 |
| 1123 | R0130:E05 |
| 1124 | R0130:E06 |
| 1125 | R0130:E07 |
| 1126 | R0130:E08 |
| 1127 | R0130:E09 |
| 1128 | R0130:E10 |
| 1129 | R0130:B11 |
| 1130 | R0130:E12 |
| 1131 | R0130:F02 |
| 1132 | R0130:F03 |
| 1133 | R0130:F05 |
| 1134 | R0130:F06 |
| 1135 | R0130:F07 |
| 1136 | R0130:F08 |
| 1137 | R0130:F09 |
| 1138 | R0130:F10 |
| 1139 | R0130:F11 |
| 1140 | R0130:F12 |
| 1141 | R0130:G01 |
| 1142 | R0130:G02 |
| 1143 | R0130:G03 |
| 1144 | R0130:G04 |
| 1145 | R0130:G05 |
| 1146 | R0130:G06 |
| 1147 | R0130:G07 |
| 1148 | R0130:G08 |
| 1149 | R0130:G09 |
| 1150 | R0130:G10 |
| 1151 | R0130:G11 |
| 1152 | R0130:G12 |
| 1153 | R0130:H01 |
| 1154 | R0130:H02 |
| 1155 | R0130:H04 |
| 1156 | R0130:H05 |
| 1157 | R0130:H06 |
| 1158 | R0130:H07 |
| 1159 | R0130:H08 |

[0862] TABLE 1E

| | CLONE |
|---|---|
| SEQ ID NO | IDENTIFIER |
| 1160 | R0130:H09 |
| 1161 | R0130:H10 |
| 1162 | R0130:H11 |
| 1163 | R0131:A02 |
| 1164 | R0131:A05 |
| 1165 | R0131:A06 |
| 1166 | R0131:A07 |
| 1167 | R0131:A08 |
| 1168 | R0131:A09 |
| 1169 | R0131:A11 |
| 1170 | R0131:A12 |
| 1171 | R0131:B02 |
| 1172 | R0131:B03 |
| 1173 | R0131:B04 |
| 1174 | R0131:B05 |
| 1175 | R0131:B07 |
| 1176 | R0131:B08 |
| 1177 | R0131:B09 |
| 1178 | R0131:B10 |
| 1179 | R0131:B11 |
| 1180 | R0131:C01 |
| 1181 | R0131:C02 |
| 1182 | R0131:C03 |
| 1183 | R0131:C04 |
| 1184 | R0131:C06 |
| 1185 | R0131:C07 |
| 1186 | R0131:C08 |
| 1187 | R0131:C10 |
| 1188 | R0131:C11 |
| 1189 | R0131:C12 |
| 1190 | R0131:D02 |
| 1191 | R0131:D03 |
| 1192 | R0131:D04 |
| 1193 | R0131:D05 |
| 1194 | R0131:D06 |
| 1195 | R0131:D07 |
| 1196 | R0131:D09 |
| 1197 | R0131:D10 |
| 1198 | R0131:D11 |
| 1199 | R0131:D12 |
| 1200 | R0131:E01 |
| 1201 | R0131:E02 |
| 1202 | R0131:E03 |
| 1203 | R0131:E04 |
| 1204 | R0131:E06 |
| 1205 | R0131:E07 |
| 1206 | R0131:E08 |
| 1207 | R0131:E10 |
| 1208 | R0131:E11 |
| 1209 | R0131.E12 |
| 1210 | R0131:F02 |
| 1211 | R0131:F04 |
| 1212 | R0131:F05 |
| 1213 | R0131:F06 |
| 1214 | R0131:F07 |
| 1215 | R0131:F08 |
| 1216 | R0131:F09 |
| 1217 | R0131:F10 |
| 1218 | R0131:F11 |
| 1219 | R0131:F12 |
| 1220 | R0131:G01 |
| 1221 | R0131:G02 |
| 1222 | R0131:G03 |
| 1223 | R0131:G04 |
| 1224 | R0131:G05 |
| 1225 | R0131:G06 |
| 1226 | R0131:G07 |
| 1227 | R0131:G08 |
| 1228 | R0131:G09 |
| 1229 | R0131:G10 |
| 1230 | R0131:G11 |
| 1231 | R0131:G12 |
| 1232 | R0131:H01 |
| 1233 | R0131:H02 |
| 1234 | R0131:H05 |
| 1235 | R0131:H06 |
| 1236 | R0131:H07 |
| 1237 | R0131:H08 |
| 1238 | R0131:H09 |
| 1239 | R0131:H11 |

[0863] TABLE 2
Clone names for NSCLC-SQL1 and corresponding SEQ ID NOs

| | CLONE |
|---|---|
| SEQ ID NO | IDENTIFIER |
| 1240 | Contig 54 |
| 1241 | Contig 55 |
| 1242 | Contig 57 |
| 1243 | Contig 58 |
| 1244 | Contig 60 |
| 1245 | Contig 62 |
| 1246 | Contig 63 |
| 1247 | Contig 64 |
| 1248 | Contig 65 |
| 1249 | Contig 66 |
| 1250 | Contig 67 |
| 1251 | Contig 68 |
| 1252 | Contig 69 |
| 1253 | Contig 70 |
| 1254 | Contig 7l |
| 1255 | Contig 72 |
| 1256 | Contig 73 |
| 1257 | Contig 74 |
| 1258 | Contig 75 |
| 1259 | Contig 77 |
| 1260 | Contig 78 |
| 1261 | Contig 79 |
| 1262 | Contig 80 |
| 1263 | Contig 8l |
| 1264 | Contig 83 |
| 1265 | Contig 84 |
| 1266 | Contig 86 |
| 1267 | Contig 87 |
| 1268 | Contig 88 |
| 1269 | Contig 89 |
| 1270 | Contig 90 |
| 1271 | Contig 91 |
| 1272 | Contig 92 |
| 1273 | Contig 94 |
| 1274 | Contig 95 |
| 1275 | Contig 96 |
| 1276 | Contig 97 |
| 1277 | Contig 98 |
| 1278 | Contig 99 |
| 1279 | Contig 100 |

[0864] TABLE 3
Clone names for NSCLC-SCLI and corresponding SEQ ID NOs

| | CLONE |
|---|---|
| SEQ ID NO | IDENTIFIER |
| 1280 | Contig 38 |
| 1281 | Contig 39 |
| 1282 | Contig 40 |
| 1283 | Contig 41 |
| 1284 | Contig 42 |
| 1285 | Contig 43 |
| 1286 | Contig 44 |
| 1287 | Contig 45 |
| 1288 | Contig 46 |
| 1289 | Contig 47 |
| 1290 | Contig 48 |
| 1291 | Contig 49 |
| 1292 | Contig 51 |
| 1293 | Contig 52 |
| 1294 | Contig 53 |
| 1295 | Contig 54 |
| 1296 | Contig 55 |
| 1297 | Contig 56 |
| 1298 | Contig 57 |
| 1299 | Contig 58 |
| 1300 | Contig 59 |
| 1301 | Contig 60 |
| 1302 | Contig 62 |
| 1303 | Contig 63 |
| 1304 | Contig 64 |
| 1305 | Contig 65 |
| 1306 | Contig 66 |
| 1307 | Contig 67 |
| 1308 | Contig 68 |
| 1309 | Contig 69 |
| 1310 | Contig 70 |
| 1311 | Contig 72 |
| 1312 | Contig 73 |
| 1313 | Contig 75 |
| 1314 | Contig 76 |
| 1315 | Contig 77 |
| 1316 | Contig 78 |
| 1317 | Contig 79 |
| 1318 | Contig 80 |
| 1319 | Contig 81 |
| 1320 | Contig 82 |

[0865] TABLE 4A
Clone names for NSCLC-SCL3-SCL4 and corresponding SEQ ID NOs

| | CLONE |
|---|---|
| SEQ ID NO | IDENTIFIER |
| 1321 | Contig 94 |
| 1322 | Contig 95 |
| 1323 | Contig 96 |
| 1324 | Contig 97 |
| 1325 | Contig 98 |
| 1326 | Contig 99 |
| 1327 | Contig 100 |
| 1328 | Contig 101 |
| 1329 | Contig 102 |
| 1330 | Contig 103 |
| 1331 | Contig 104 |
| 1332 | Contig 105 |
| 1333 | Contig 106 |
| 1334 | Contig 107 |
| 1335 | Contig 108 |
| 1336 | Contig 109 |
| 1337 | Contig 110 |
| 1338 | Contig 111 |
| 1339 | Contig 112 |
| 1340 | Contig 113 |
| 1341 | Contig 114 |
| 1342 | Contig 115 |
| 1343 | Contig 116 |
| 1344 | Contig 117 |
| 1345 | Contig 118 |
| 1346 | Contig 119 |
| 1347 | Contig 120 |
| 1348 | Contig 121 |
| 1349 | Contig 122 |
| 1350 | Contig 123 |
| 1351 | Contig 124 |
| 1352 | Contig 125 |
| 1353 | Contig 126 |
| 1354 | Contig 127 |
| 1355 | Contig 128 |
| 1356 | Contig 129 |
| 1357 | Contig 130 |
| 1358 | Contig 131 |
| 1359 | Contig 132 |
| 1360 | Contig 133 |
| 1361 | Contig 134 |
| 1362 | Contig 135 |
| 1363 | Contig 136 |
| 1364 | Contig 137 |
| 1365 | Contig 138 |
| 1366 | Contig 139 |
| 1367 | Contig 140 |
| 1368 | Contig 141 |
| 1369 | Contig 142 |
| 1370 | Contig 143 |
| 1371 | Contig 144 |
| 1372 | Contig 145 |
| 1373 | Contig 146 |
| 1374 | Contig 147 |
| 1375 | Contig 148 |
| 1376 | Contig 149 |
| 1377 | Contig 150 |
| 1378 | Contig 151 |
| 1379 | Contig 152 |
| 1380 | Contig 153 |
| 1381 | Contig 154 |
| 1382 | Contig 155 |
| 1383 | Contig 156 |
| 1384 | Contig 157 |
| 1385 | Contig 158 |
| 1386 | Contig 159 |
| 1387 | Contig 160 |
| 1388 | Contig 161 |
| 1389 | Contig 162 |
| 1390 | Contig 163 |
| 1391 | Contig 164 |
| 1392 | Contig 165 |
| 1393 | Contig 166 |
| 1394 | Contig 167 |
| 1395 | Contig 168 |
| 1396 | Contig 169 |
| 1397 | Contig 170 |
| 1398 | Contig 171 |
| 1399 | Contig 172 |
| 1400 | Contig 173 |
| 1401 | Contig 174 |
| 1402 | Contig 175 |
| 1403 | Contig 176 |

[0866] TABLE 4B
Clone names for NSCLC-SCL3-SCL4 and corresponding SEQ ID NOs

| | CLONE |
|---|---|
| SEQ ID NO | IDENTIFIER |
| 1404 | Contig 177 |
| 1405 | Contig 178 |
| 1406 | Contig 179 |
| 1407 | Contig 180 |
| 1408 | Contig 181 |
| 1409 | Contig 182 |
| 1410 | Contig 183 |
| 1411 | Contig 184 |
| 1412 | Contig 185 |
| 1413 | Contig 186 |
| 1414 | Contig 187 |

[0867] TABLE 5
Clone names for SCLC-SQL1 and corresponding SEQ ID NOs

| | CLONE |
|---|---|
| SEQ ID NO | IDENTIFIER |
| 1415 | Contig 17 |
| 1416 | Contig 18 |
| 1417 | Contig 20 |
| 1418 | Contig 23 |
| 1419 | Contig 24 |
| 1420 | Contig 25 |
| 1421 | Contig 26 |
| 1422 | Contig 27 |
| 1423 | Contig 28 |
| 1424 | Contig 29 |
| 1425 | Contig 30 |
| 1426 | Contig 31 |
| 1427 | Contig 20 |
| 1428 | Contig 21 |
| 1429 | Contig 22 |
| 1430 | Contig 23 |
| 1431 | Contig 24 |
| 1432 | Contig 25 |
| 1433 | Contig 26 |
| 1434 | Contig 27 |
| 1435 | Contig 28 |
| 1436 | Contig 29 |
| 1437 | Contig 30 |
| 1438 | Contig 31 |
| 1439 | Contig 32 |
| 1440 | Contig 33 |
| 1441 | Contig 34 |
| 1442 | Contig 35 |
| 1443 | Contig 36 |
| 1444 | Contig 37 |
| 1445 | Contig 38 |

[0868] TABLE 6A
Clone names for SCLC-SCL3-SCL4 and corresponding SEQ ID NOs

| | CLONE | | CLONE |
|---|---|---|---|
| SEQ ID NO | IDENTIFIER | SEQ ID NO | IDENTIFIER |
| 1446 | Contig 116 | 1488 | Contig 160 |
| 1447 | Contig 117 | 1489 | Contig 161 |
| 1448 | Contig 118 | 1490 | Contig 162 |
| 1449 | Contig 119 | 1491 | Contig 163 |
| 1450 | Contig 120 | 1492 | Contig 164 |
| 1451 | Contig 122 | 1493 | Contig 165 |
| 1452 | Contig 123 | 1494 | Contig 166 |
| 1453 | Contig 124 | 1495 | Contig 167 |
| 1454 | Contig 125 | 1496 | Contig 168 |
| 1455 | Contig 126 | 1497 | Contig 169 |
| 1456 | Contig 127 | 1498 | Contig 170 |
| 1457 | Contig 128 | 1499 | Contig 171 |
| 1458 | Contig 129 | 1500 | Contig 172 |
| 1459 | Contig 130 | 1501 | Contig 173 |
| 1460 | Contig 131 | 1502 | Contig 174 |
| 1461 | Contig 132 | 1503 | Contig 175 |
| 1462 | Contig 133 | 1504 | Contig 176 |
| 1463 | Contig 135 | 1505 | Contig 177 |
| 1464 | Contig 136 | 1506 | Contig 178 |
| 1465 | Contig 137 | 1507 | Contig 179 |
| 1466 | Contig 138 | 1508 | Contig 181 |
| 1467 | Contig 139 (L985P) | 1509 | Contig 182 |
| 1468 | Contig 140 | 1510 | Contig 183 |
| 1469 | Contig 141 | 1511 | Contig 184 |
| 1470 | Contig 142 | 1512 | Contig 185 |
| 1471 | Contig 143 | 1513 | Contig 186 |
| 1472 | Contig 144 | 1514 | Contig 187 |
| 1473 | Contig 145 | 1515 | Contig 189 |
| 1474 | Contig 146 | 1516 | Contig 190 |
| 1475 | Contig 147 | 1517 | Contig 191 |
| 1476 | Contig 148 | 1518 | Contig 192 |
| 1477 | Contig 149 | 1519 | Contig 193 |
| 1478 | Contig 150 | 1520 | Contig 194 |
| 1479 | Contig 151 | 1521 | Contig 195 |
| 1480 | Contig 152 | 1522 | Contig 196 |
| 1481 | Contig 153 | 1523 | Contig 197 |
| 1482 | Contig 154 | 1524 | Contig 198 |
| 1483 | Contig 155 | 1525 | Contig 199 |
| 1484 | Contig 156 | 1526 | Contig 200 |
| 1485 | Contig 157 | 1527 | Contig 201 |
| 1486 | Contig 158 | 1528 | Contig 202 |
| 1487 | Contig 159 | | |

[0869] TABLE 6B
Clone names for SCLC-SCL3-SCL4 and corresponding SEQ ID NOs

| | CLONE |
|---|---|
| SEQ ID NO | IDENTIFIER |
| 1529 | Contig 203 |
| 1530 | Contig 204 |
| 1531 | Contig 205 |
| 1532 | Contig 206 |
| 1533 | Contig 207 |
| 1534 | Contig 208 |
| 1535 | Contig 209 |
| 1536 | Contig 210 |
| 1537 | Contig 211 |
| 1538 | Contig 212 |
| 1539 | Contig 213 |
| 1540 | Contig 214 |
| 1541 | Contig 215 |
| 1542 | Contig 216 |
| 1543 | Contig 217 |
| 1544 | Contig 218 |
| 1545 | Contig 219 |
| 1546 | Contig 220 |
| 1547 | Contig 221 |
| 1548 | Contig 222 |
| 1549 | Contig 223 |
| 1550 | Contig 224 |
| 1551 | Contig 225 |
| 1552 | Contig 226 |
| 1553 | Contig 227 |
| 1554 | Contig 228 |
| 1555 | Contig 229 |
| 1556 | Contig 230 |
| 1557 | Contig 231 |
| 1558 | Contig 232 |
| 1559 | Contig 233 |
| 1560 | Contig 234 |
| 1561 | Contig 235 |
| 1562 | Contig 236 |
| 1563 | Contig 237 |

[0870] TABLE 7

| | CLONE | | CLONE |
|---|---|---|---|
| SEQ ID NO: | IDENTIFIER | SEQ ID NO: | IDENTIFIER |
| 1564 | R0124:E05 | 1609 | R0129:D09 |
| 1565 | R0124:E06 | 1610 | R0129:D10 |
| 1566 | R0124:E08 | 1611 | R0129:D11 |
| 1567 | R0124:F07 | 1612 | R0129:E02 |
| 1568 | R0124:F08 | 1613 | R0129:E03 |
| 1569 | R0124:F09 | 1614 | R0129:E04 |
| 1570 | R0124:G04 | 1615 | R0129:E05 |
| 1571 | R0129:A02 | 1616 | R0129:E06 |
| 1572 | R0129:A03 | 1617 | R0129:E07 |
| 1573 | R0129:A06 | 1618 | R0129:E08 |
| 1574 | R0129:A07 | 1619 | R0129:E09 |
| 1575 | R0129:A08 | 1620 | R0129:E11 |
| 1576 | R0129:A09 | 1621 | R0129:E12 |
| 1577 | R0129:A10 | 1622 | R0129:F01 |
| 1578 | R0129:A11 | 1623 | R0129.F02 |
| 1579 | R0129:A12 | 1624 | R0129:F03 |
| 1580 | R0129:B02 | 1625 | R0129:F04 |
| 1581 | R0129:B03 | 1626 | R0129:F06 |
| 1582 | R0129:B04 | 1627 | R0129:F07 |
| 1583 | R0129:B05 | 1628 | R0129:F08 |
| 1584 | R0129:B06 | 1629 | R0129:F09 |
| 1585 | R0129:B07 | 1630 | R0129:F10 |
| 1586 | R0129:B08 | 1631 | R0129:F11 |
| 1587 | R0129:B09 | 1632 | R0129:F12 |
| 1588 | R0129:B10 | 1633 | R0129:G01 |
| 1589 | R0129:B11 | 1634 | R0129.G02 |
| 1590 | R0129:B12 | 1635 | R0129:G03 |
| 1591 | R0129:C01 | 1636 | R0129:G04 |
| 1592 | R0129:C02 | 1637 | R0129:G05 |
| 1593 | R0129:C03 | 1638 | R0129:G06 |
| 1594 | R0129:C04 | 1639 | R0129:G07 |
| 1595 | R0129:C06 | 1640 | R0129:G08 |
| 1596 | R0129:C07 | 1641 | R0129:G09 |
| 1597 | R0129:C08 | 1642 | R0129:G10 |
| 1598 | R0129:C09 | 1643 | R0129:G11 |
| 1599 | R0129:C10 | 1644 | R0129:G12 |
| 1600 | R0129:C11 | 1645 | R0129:H01 |
| 1601 | R0129:C12 | 1646 | R0129:H02 |
| 1602 | R0129:D01 | 1647 | R0129:H03 |
| 1603 | R0129:D03 | 1648 | R0129:H04 |
| 1604 | R0129:D04 | 1649 | R0129:H05 |
| 1605 | R0129:D05 | 1650 | R0129:H08 |
| 1606 | R0129:D06 | 1651 | R0129:H09 |
| 1607 | R0129:D07 | 1652 | R0129:H10 |
| 1608 | R0129:D08 | 1653 | R0129:H11 |

[0871] TABLE 8

| | CLONE |
|---|---|
| SEQ ID NO: | IDENTIFIER |
| 1654 | 26484 |
| 1655 | 26496 |
| 1656 | 26517 |
| 1657 | 26531 |
| 1658 | 26022 |
| 1659 | 26026 |
| 1660 | 26810 |
| 1661 | 26815 |
| 1662 | 26869 |
| 1663 | 26883 |
| 1664 | 26902 |

[0872] SEQ ID NOs: 1665 and 1666 are primers used in the amplification of the coding region of L548S

[0873] SEQ ID NO: 1667 is the protein sequence of expressed recombinant L7548S.

[0874] SEQ ID NO: 1668 is the cDNA sequence of expressed recombinant L7548S.

[0875] SEQ ID NO: 1669 is the extended cDNA sequence of clone #18971 (L801P).

[0876] SEQ ID NO: 1670 is the amino acid sequence of open reading frame ORF4 encoded by SEQ ID NO: 1669.

[0877] SEQ ID NO: 1671 is the amino acid sequence of open reading frame ORF5 encoded by SEQ ID NO: 1669.

[0878] SEQ ID NO: 1672 is the amino acid sequence of open reading frame ORF6 encoded by SEQ ID NO: 1669.

[0879] SEQ ID NO: 1673 is the amino acid sequence of open reading frame ORF7 encoded by SEQ ID NO: 1669.

[0880] SEQ ID NO: 1674 is the amino acid sequence of open reading frame ORF8 encoded by SEQ ID NO: 1669.

[0881] SEQ ID NO: 1675 is the amino acid sequence of open reading frame ORF9 encoded by SEQ ID NO: 1669.

[0882] SEQ ID NO: 1676 is the extended cDNA for contig 139 (SEQ ID NO:1467), also known as L985P.

[0883] SEQ ID NO: 1677 is the L985P amino acid sequence encoded by SEQ ID NO: 1676.

[0884] SEQ ID NO: 1678 is the amino acid sequence of open reading frame ORF5X of SEQ ID NO: 1669.

[0885] SEQ ID NO: 1679 is the amino acid sequence of an open reading frame for contig 139 (SEQ ID NO: 1467).

[0886] SEQ ID NO: 1680-1788, set forth in the table below, represent cDNA clones identified by microarray analysis of the SQL1, SCL1, SCL3 and SCL4 libraries on lung chip 5.

| | CLONE |
|---|---|
| SEQ ID NO: | IDENTIFIER |
| 1680 | 58456 |
| 1681 | 58458 |
| 1682 | 58462 |
| 1683 | 58469 |
| 1684 | 58470 |
| 1685 | 58482 |
| 1686 | 58485 |
| 1687 | 58501 |
| 1688 | 58502 |
| 1689 | 58505 |
| 1690 | 58507 |
| 1691 | 58509 |
| 1692 | 58512 |
| 1693 | 58527 |
| 1694 | 58529 |
| 1695 | 58531 |
| 1696 | 58537 |
| 1697 | 58539 |
| 1698 | 58545 |
| 1699 | 59319 |
| 1700 | 59322 |
| 1701 | 59348 |
| 1702 | 59350 |
| 1703 | 59363 |
| 1704 | 59365 |
| 1705 | 59370 |
| 1706 | 59373 |
| 1707 | 59376 |
| 1708 | 61050 |
| 1709 | 61051 |
| 1710 | 61052 |
| 1711 | 61054 |
| 1712 | 61056 |
| 1713 | 61057 |
| 1714 | 61060 |
| 1715 | 61062 |
| 1716 | 61063 |
| 1717 | 61064 |
| 1718 | 61065 |
| 1719 | 61066 |
| 1720 | 61069 |
| 1721 | 61070 |
| 1722 | 61071 |
| 1723 | 61074 |
| 1724 | 61075 |
| 1725 | 61077 |
| 1726 | 61079 |
| 1727 | 61080 |
| 1728 | 61081 |
| 1729 | 61083 |
| 1730 | 61085 |
| 1731 | 61086 |
| 1732 | 61088 |
| 1733 | 61090 |
| 1734 | 61091 |
| 1735 | 61093 |
| 1736 | 61094 |
| 1737 | 61096 |
| 1738 | 61097 |
| 1739 | 61099 |
| 1740 | 61100 |
| 1741 | 61103 |
| 1742 | 61105 |
| 1743 | 61106 |
| 1744 | 61110 |
| 1745 | 61113 |
| 1746 | 61115 |
| 1747 | 61117 |
| 1748 | 61118 |
| 1749 | 61119 |
| 1750 | 61120 |
| 1751 | 61122 |
| 1752 | 61125 |
| 1753 | 61126 |
| 1754 | 61130 |
| 1755 | 61133 |
| 1756 | 61134 |
| 1757 | 61135 |
| 1758 | 61137 |
| 1759 | 61139 |
| 1760 | 61143 |
| 1761 | 61144 |
| 1762 | 61148 |
| 1763 | 61151 |
| 1764 | 61155 |
| 1765 | 61156 |
| 1766 | 61159 |
| 1767 | 61160 |
| 1768 | 61163 |
| 1769 | 61167 |
| 1770 | 61172 |
| 1771 | 61173 |
| 1772 | 61176 |
| 1773 | 61177 |
| 1774 | 61183 |
| 1775 | 61185 |
| 1776 | 61188 |
| 1777 | 61192 |
| 1778 | 61198 |
| 1779 | 61201 |
| 1780 | 61202 |
| 1781 | 61204 |
| 1782 | 61206 |
| 1783 | 61210 |
| 1784 | 61212 |
| 1785 | 61216 |
| 1786 | 61225 |
| 1787 | 61226 |
| 1788 | 61227 |

[0887] SEQ ID NO:1789 is the cDNA sequence of clone #47988 (L972P).

[0888] SEQ ID NO: 1790 is the cDNA sequence of clone #48005 (L979P).

[0889] SEQ ID NO: 1791 is an extended cDNA sequence for clone #48005 (L979P).

[0890] SEQ ID NO:1792 is an extended cDNA sequence for clone #49826 (SEQ ID NO:1279; L980P).

[0891] SEQ ID NO: 1793 is an extended cDNA sequence for clone #20631 (SEQ ID NO:117; L973P).

[0892] SEQ ID NO:1794 is an extended cDNA sequence for clone #20661 (SEQ ID NO:128; L974P).

[0893] SEQ ID NO:1795 is an extended cDNA sequence for clone #50430 (SEQ ID NO:1442; L996P).

[0894] SEQ ID NO:1796 is an extended cDNA sequence for clone #26961 (SEQ ID NO:288; L977P).

[0895] SEQ ID NO: 1797 is an extended cDNA sequence for clone #24928 (SEQ ID NO: 1339; L978P).

[0896] SEQ ID NO: 1798 is an extended cDNA sequence for clone #50507 (SEQ ID NO: 1446; L984P).

[0897] SEQ ID NO:1799 is an extended cDNA sequence for clone #50645 (SEQ ID NO:1531; L988P).

[0898] SEQ ID NO:1800 is an extended cDNA sequence for clone #50628 (SEQ ID NO:1533; L1423P).

[0899] SEQ ID NO:1801 is an extended cDNA sequence for clone #50560 (SEQ ID NO:1527; L987P).

[0900] SEQ ID NO: 1802 is an extended cDNA sequence for clone #27699 (SEQ ID NO:468; L998P).

[0901] SEQ ID NO: 1803 is an extended cDNA sequence for clone #59303 (SEQ ID NO:949; L1425P).

[0902] SEQ ID NO: 1804 is an extended cDNA sequence for clone #59314 (SEQ ID NO: 1156; L1426P).

[0903] SEQ ID NO:1805 is an extended cDNA sequence for clone #59298 (SEQ ID NO:921; L1427P).

[0904] SEQ ID NO: 1806 is an amino acid sequence encoded by SEQ ID NO:1791.

[0905] SEQ ID NO: 1807 is an amino acid sequence encoded by SEQ ID NO:1792.

[0906] SEQ ID NO: 1808 is an amino acid sequence encoded by SEQ ID NO: 1793.

[0907] SEQ ID NO: 1809 is an amino acid sequence encoded by SEQ ID NO:1794.

[0908] SEQ ID NO: 1810 is an amino acid sequence encoded by SEQ ID NO:1795.

[0909] SEQ ID NO: 1811 is an amino acid sequence encoded by SEQ ID NO:1796.

[0910] SEQ ID NO: 1812 is an amino acid sequence encoded by SEQ ID NO:1797.

[0911] SEQ ID NO: 1813 is an amino acid sequence encoded by SEQ ID NO:1798.

[0912] SEQ ID NO: 1814 is an amino acid sequence encoded by SEQ ID NO:1799.

[0913] SEQ ID NO: 1815 is an amino acid sequence encoded by SEQ ID NO: 1800.

[0914] SEQ ID NO: 1816 is an amino acid sequence encoded by SEQ ID NO: 1527 (L987P).

[0915] SEQ ID NO: 1817 is an amino acid sequence encoded by SEQ ID NO: 1823.

[0916] SEQ ID NO: 1818 is an amino acid sequence encoded by SEQ ID NO: 1801.

[0917] SEQ ID NO: 1819 is an amino acid sequence encoded by SEQ ID NO:1802.

[0918] SEQ ID NO: 1820 is an amino acid sequence encoded by SEQ ID NO:1803.

[0919] SEQ ID NO: 1821 is an amino acid sequence encoded by SEQ ID NO:1804.

[0920] SEQ ID NO: 1822 is an amino acid sequence encoded by SEQ ID NO:1805.

[0921] SEQ ID NO: 1823 is an extended cDNA sequence for clone #50560 (SEQ ID NO: 1527; L987P).

[0922] SEQ ID NO: 1824 is a full length cDNA sequence for clone L872P (SEQ ID NO:34).

[0923] SEQ ID NO: 1825 is the amino acid sequence encoded by SEQ ID NO: 1824.

[0924] SEQ ID NO: 1826 is the cDNA sequence encoding the N-terminal portion of L552:.

[0925] SEQ ID NO: 1827-1829 are cDNA sequences of portions of L552S.

[0926] SEQ ID NO: 1830 is the N-terminal portion of L552S.

[0927] SEQ ID NO: 1831-1833 are the amino acid sequences encoded by SEQ ID NO: 1827-1829, respectively.

[0928] SEQ ID NO: 1834-1856 are the amino acid sequences of peptides of L548S.

[0929] SEQ ID NO: 1857-1860 are PCR primers. SEQ ID NO: 1861 is the determined DNA sequence for a fusion of Ra12 and ORF4 of P801P.

[0930] SEQ ID NO: 1862 is the determined DNA sequence for a fusion of Ra12 and ORF5 of P801P.

[0931] SEQ ID NO: 1863 is the amino acid sequence of the fusion of Ra12 and ORF4 of P801 P.

[0932] SEQ ID NO: 1864 is the amino acid sequence of the fusion of Ra12 and ORF5 of P801P.

[0933] SEQ ID NO:1865 is the determined cDNA sequence for clone L984P_(573A).

[0934] SEQ ID NO:1866 is the determined cDNA sequence for clone L984P_(512A).

[0935] SEQ ID NO:1867 is the determined cDNA sequence for clone L984P_(NCI-H128).

[0936] SEQ ID NO: 1868 is the determined cDNA sequence for clone L984P_(DMS-79).

[0937] SEQ ID NO:1869 is the amino acid sequence encoded by SEQ ID NO: 1865.

[0938] SEQ ID NO: 1870 is the amino acid sequence encoded by SEQ ID NO: 1866.

[0939] SEQ ID NO: 1871 is the amino acid sequence encoded by SEQ ID NO: 1867.

[0940] SEQ ID NO: 1872 is the amino acid sequence encoded by SEQ ID NO: 1868.

[0941] SEQ ID NO:1873 is a full length cDNA sequence for clone L985P (partial sequence given in SEQ ID NO:1467).

[0942] SEQ ID NO: 1874 is the amino acid sequence for L985P encoded by SEQ ID NO: 1873.

[0943] SEQ ID NO: 1875 is the predicted and determined cDNA sequence for a fusion of Ra12 and L985P.SEQ ID NO: 1876 is the predicted amino acid sequence of a fusion of Ra12 and L985P encoded by SEQ ID NO:1875.

[0944] SEQ ID NO:1877 is the predicted cDNA sequence for a fusion of Ra12S and L985P.

[0945] SEQ ID NO:1878 is the predicted amino acid sequence of a fusion of Ra12S and L985P encoded by SEQ ID NO:1877.

[0946] SEQ ID NO: 1879 is the predicted cDNA sequence for a fusion of Ra12S and L985PEx.

[0947] SEQ ID NO:1880 is the predicted amino acid sequence of a fusion of Ra12S and L985PEx encoded by SEQ ID NO:1879.

[0948] SEQ ID NO: 1881 is the predicted cDNA sequence the extracellular loop 2 peptide of L985P.

[0949] SEQ ID NO: 1882 is the predicted amino acid sequence for the extracellular loop 2 peptide of L985P encoded by SEQ ID NO: 1875.

[0950] SEQ ID NO:1883 is an extended cDNA sequence for clone #59316 (SEQ ID NO:1180; L1428P).

[0951] SEQ ID NO: 1884 is a first predicted amino acid sequence encoded by SEQ ID NO: 1883 and designated L1428P-ORF1.

[0952] SEQ ID NO:1885 is a second predicted amino acid sequence encoded by SEQ ID NO:1883 and designated L1428P-ORF2.

[0953] SEQ ID NO: 1886 is a third predicted amino acid sequence encoded by SEQ ID NO: 1883 and designated L1428P-ORF3.

[0954] SEQ ID NO:1887 is a fourth predicted amino acid sequence encoded by SEQ ID NO:1883 and designated L1428P-ORF4.

[0955] SEQ ID NO: 1888 is a fifth predicted amino acid sequence encoded by SEQ ID NO: 1883 and designated L1428P-ORF5.

[0956] SEQ ID NO:1889 is a sixth predicted amino acid sequence encoded by SEQ ID NO:1883 and designated L1428P-ORF6.

[0957] SEQ ID NO: 1890 is a seventh predicted amino acid sequence encoded by SEQ ID NO:1883 and designated L1428P-ORF7.

[0958] SEQ ID NO:1891-1900- are the nucleotide sequences for the database hits described in Table 16.

[0959] SEQ ID NO:1901-1909 are the deduced amino acid sequences encoded by the nucleotide sequences described in Table 16.

[0960] SEQ ID NO:1910 is the full-length cDNA for clone L1437P (partial sequence given in SEQ ID NO: 1896).

[0961] SEQ ID NO:1911 is the forward primer PDM-433 for the coding region of clone L548S.

[0962] SEQ ID NO:1912 is the reverse primer PDM-438 for the coding region of clone L548S.

[0963] SEQ ID NO:1913 is the amino acid sequence for the expressed recombinant L548S.

[0964] SEQ ID NO:1914 is the DNA coding sequence for the recombinant L514S.

[0965] SEQ ID NO: 1915 is the forward primer PDM-498 for the coding region of clone L551 S

[0966] SEQ ID NO: 1916 is the reverse primer PDM-499 for the coding region of clone L551 S

[0967] SEQ ID NO:1917 is the amino acid sequence for the expressed recombinant L551S.

[0968] SEQ ID NO:1918 is the DNA coding sequence for the recombinant L551S.

[0969] SEQ ID NO: 1919 is the forward primer PDM-479 for the coding region of clone L552S

[0970] SEQ ID NO:1920 is the reverse primer PDM-480 for the coding region of clone L552S

[0971] SEQ ID NO:1921 is the amino acid sequence for the expressed recombinant L552S.

[0972] SEQ ID NO:1922 is the DNA coding sequence for the recombinant L552S.

[0973] SEQ ID NO:1923 is the predicted full-length cDNA sequence for clone #19069 (partial sequence given in SEQ ID NO:90).

[0974] SEQ ID NO:1924 is the predicted full-length cDNA sequence for clone #18965 or #19002 (partial sequence given in SEQ ID NO:15).

[0975] SEQ ID NO:1925 is the deduced amino acid sequence encoded by SEQ ID NO:1923.

[0976] SEQ ID NO:1926 is the deduced amino acid sequence encoded by SEQ ID NO:1924.

### DETAILED DESCRIPTION OF THE INVENTION

[0977] The present invention is directed generally to compositions and their use in the therapy and diagnosis of cancer, particularly lung cancer. As described further below, illustrative compositions of the present invention include, but are not restricted to, polypeptides, particularly immunogenic polypeptides, polynucleotides encoding such polypeptides, antibodies and other binding agents, antigen presenting cells (APCs) and immune system cells (e.g., T cells).

[0978] The practice of the present invention will employ, unless indicated specifically to the contrary, conventional methods of virology, immunology, microbiology, molecular biology and recombinant DNA techniques within the skill of the art, many of which are described below for the purpose of illustration. Such techniques are explained fully in the literature. See, e.g., Sambrook, et al. Molecular Cloning: A Laboratory Manual (2nd Edition, 1989); Maniatis et al. Molecular Cloning: A Laboratory Manual (1982); DNA Cloning: A Practical Approach, vol. I & II (D. Glover, ed.); Oligonucleotide Synthesis (N. Gait, ed., 1984); Nucleic Acid Hybridization (B. Hames & S. Higgins, eds., 1985); Transcription and Translation (B. Hames & S. Higgins, eds., 1984); Animal Cell Culture (R. Freshney, ed., 1986); Perbal, A Practical Guide to Molecular Cloning (1984).

[0979] All publications, patents and patent applications cited herein, whether supra or infra, are hereby incorporated by reference in their entirety.

[0980] As used in this specification and the appended claims, the singular forms “a,” “an” and “the” include plural references unless the content clearly dictates otherwise.

[0981] Polypeptide Compositions

[0982] As used herein, the term “polypeptide” is used in its conventional meaning, i.e., as a sequence of amino acids. The polypeptides are not limited to a specific length of the product; thus, peptides, oligopeptides, and proteins are included within the definition of polypeptide, and such terms may be used interchangeably herein unless specifically indicated otherwise. This term also does not refer to or exclude post-expression modifications of the polypeptide, for example, glycosylations, acetylations, phosphorylations and the like, as well as other modifications known in the art, both naturally occurring and non-naturally occurring. A polypeptide may be an entire protein, or a subsequence thereof. Particular polypeptides of interest in the context of this invention are amino acid subsequences comprising epitopes, i.e., antigenic determinants substantially responsible for the immunogenic properties of a polypeptide and being capable of evoking an immune response.

[0983] Particularly illustrative polypeptides of the present invention comprise those encoded by a polynucleotide sequence set forth in any one of SEQ ID NOs:1-57, 59-323, 341-782, 784-785, 788, 790, 792, 794, 796, 800-804, 807, 808, 810-826, 878-1382, 1384-1559, 1561-1664, 1668, 1669, 1676, 1680-1706, 1708-1732, 1734, 1736-1757, 1759-1765, 1767-1770, 1772-1774, 1776-1805, 1824, 1826-1829, 1865-1868, 1873, 1883 and 1884-1890, or a sequence that hybridizes under moderately stringent conditions, or, alternatively, under highly stringent conditions, to a polynucleotide sequence set forth in any one of SEQ ID NOs:1-57, 59-323, 341-782, 784-785, 788,790, 792, 794, 796, 800-804, 807, 808, 810-826, 878-1382, 1384-1559, 1561-1664, 1668, 1669, 1676, 1680-1706, 1708-1732, 1734, 1736-1757, 1759-1765, 1767-1770, 1772-1774, 1776-1805, 1824, 1826-1829, 1865-1868, 1873, 1883 and 1884-1890. Certain other illustrative polypeptides of the invention comprise amino acid sequences as set forth in any one of SEQ ID NOs: 324-340, 786, 787, 789, 791, 793, 795, 797-799, 805, 806, 809, 827, 1667, 1670-1675, 1677-1679, 1806-1822, 1825, 1830-1833, 1834-1856, 1869-1872 and 1874.

[0984] The polypeptides of the present invention are sometimes herein referred to as lung tumor proteins or lung tumor polypeptides, as an indication that their identification has been based at least in part upon their increased levels of expression in lung tumor samples. Thus, a “lung tumor polypeptide” or “lung tumor protein,” refers generally to a polypeptide sequence of the present invention, or a polynucleotide sequence encoding such a polypeptide, that is expressed in a substantial proportion of lung tumor samples, for example preferably greater than about 20%, more preferably greater than about 30%, and most preferably greater than about 50% or more of lung tumor samples tested, at a level that is at least two fold, and preferably at least five fold, greater than the level of expression in normal tissues, as determined using a representative assay provided herein. A lung tumor polypeptide sequence of the invention, based upon its increased level of expression in tumor cells, has particular utility both as a diagnostic marker as well as a therapeutic target, as further described below.

[0985] In certain preferred embodiments, the polypeptides of the invention are immunogenic, i.e., they react detectably within an immunoassay (such as an ELISA or T-cell stimulation assay) with antisera and/or T-cells from a patient with lung cancer. Screening for immunogenic activity can be performed using techniques well known to the skilled artisan. For example, such screens can be performed using methods such as those described in Harlow and Lane, Antibodies: A Laboratory Manual, Cold Spring Harbor Laboratory, 1988. In one illustrative example, a polypeptide may be immobilized on a solid support and contacted with patient sera to allow binding of antibodies within the sera to the immobilized polypeptide. Unbound sera may then be removed and bound antibodies detected using, for example, ¹²⁵I-labeled Protein A.

[0986] As would be recognized by the skilled artisan, immunogenic portions of the polypeptides disclosed herein are also encompassed by the present invention. An “immunogenic portion,” as used herein, is a fragment of an immunogenic polypeptide of the invention that itself is immunologically reactive (i.e., specifically binds) with the B-cells and/or T-cell surface antigen receptors that recognize the polypeptide. Immunogenic portions may generally be identified using well known techniques, such as those summarized in Paul, Fundamental Immunology, 3rd ed., 243-247 (Raven Press, 1993) and references cited therein. Such techniques include screening polypeptides for the ability to react with antigen-specific antibodies, antisera and/or T-cell lines or clones. As used herein, antisera and antibodies are “antigen-specific” if they specifically bind to an antigen (i.e., they react with the protein in an ELISA or other immunoassay, and do not react detectably with unrelated proteins). Such antisera and antibodies may be prepared as described herein, and using well-known techniques.

[0987] In one preferred embodiment, an immunogenic portion of a polypeptide of the present invention is a portion that reacts with antisera and/or T-cells at a level that is not substantially less than the reactivity of the full-length polypeptide (e.g., in an ELISA and/or T-cell reactivity assay). Preferably, the level of immunogenic activity of the immunogenic portion is at least about 50%, preferably at least about 70% and most preferably greater than about 90% of the immunogenicity for the full-length polypeptide. In some instances, preferred immunogenic portions will be identified that have a level of immunogenic activity greater than that of the corresponding full-length polypeptide, e.g., having greater than about 100% or 150% or more immunogenic activity.

[0988] In certain other embodiments, illustrative immunogenic portions may include peptides in which an N-terminal leader sequence and/or transmembrane domain have been deleted. Other illustrative immunogenic portions will contain a small N- and/or C-terminal deletion (e.g., 1-30 amino acids, preferably 5-15 amino acids), relative to the mature protein.

[0989] In another embodiment, a polypeptide composition of the invention may also comprise one or more polypeptides that are immunologically reactive with T cells and/or antibodies generated against a polypeptide of the invention, particularly a polypeptide having an amino acid sequence disclosed herein, or to an immunogenic fragment or variant thereof.

[0990] In another embodiment of the invention, polypeptides are provided that comprise one or more polypeptides that are capable of eliciting T cells and/or antibodies that are immunologically reactive with one or more polypeptides described herein, or one or more polypeptides encoded by contiguous nucleic acid sequences contained in the polynucleotide sequences disclosed herein, or immunogenic fragments or variants thereof, or to one or more nucleic acid sequences which hybridize to one or more of these sequences under conditions of moderate to high stringency.

[0991] The present invention, in another aspect, provides polypeptide fragments comprising at least about 5, 10, 15, 20, 25, 50, or 100 contiguous amino acids, or more, including all intermediate lengths, of a polypeptide compositions set forth herein, such as those set forth in SEQ ID NOs:324-340, 786, 787, 789, 791, 793, 795, 797-799, 805, 806, 809, 827, 1667, 1670-1675, 1677-1679, 1806-1822, 1825, 1830-1833, 1834-1856, 1869-1872 and 1874, or those encoded by a polynucleotide sequence set forth in a sequence of SEQ ID NOs:1-57, 59-323, 341-782, 784-785, 788,790, 792, 794, 796, 800-804, 807, 808, 810-826, 878-1382, 1384-1559, 1561-1664, 1668, 1669, 1676, 1680-1706, 1708-1732, 1734, 1736-1757, 1759-1765, 1767-1770, 1772-1774, 1776-1805, 1824, 1826-1829, 1865-1868, 1873, 1883 and 1884-1890.

[0992] In another aspect, the present invention provides variants of the polypeptide compositions described herein. Polypeptide variants generally encompassed by the present invention will typically exhibit at least about 70%, 75%, 80%, 85%, 90%, 91%, 92%, 93%, 94%, 95%, 96%, 97%, 98%, or 99% or more identity (determined as described below), along its length, to a polypeptide sequences set forth herein.

[0993] In one preferred embodiment, the polypeptide fragments and variants provide by the present invention are immunologically reactive with an antibody and/or T-cell that reacts with a full-length polypeptide specifically set for the herein.

[0994] In another preferred embodiment, the polypeptide fragments and variants provided by the present invention exhibit a level of immunogenic activity of at least about 50%, preferably at least about 70%, and most preferably at least about 90% or more of that exhibited by a full-length polypeptide sequence specifically set forth herein.

[0995] A polypeptide “variant,” as the term is used herein, is a polypeptide that typically differs from a polypeptide specifically disclosed herein in one or more substitutions, deletions, additions and/or insertions. Such variants may be naturally occurring or may be synthetically generated, for example, by modifying one or more of the above polypeptide sequences of the invention and evaluating their immunogenic activity as described herein and/or using any of a number of techniques well known in the art.

[0996] For example, certain illustrative variants of the polypeptides of the invention include those in which one or more portions, such as an N-terminal leader sequence or transmembrane domain, have been removed. Other illustrative variants include variants in which a small portion (e.g., 1-30 amino acids, preferably 5-15 amino acids) has been removed from the N- and/or C-terminal of the mature protein.

[0997] In many instances, a variant will contain conservative substitutions. A “conservative substitution” is one in which an amino acid is substituted for another amino acid that has similar properties, such that one skilled in the art of peptide chemistry would expect the secondary structure and hydropathic nature of the polypeptide to be substantially unchanged. As described above, modifications may be made in the structure of the polynucleotides and polypeptides of the present invention and still obtain a functional molecule that encodes a variant or derivative polypeptide with desirable characteristics, e.g., with immunogenic characteristics. When it is desired to alter the amino acid sequence of a polypeptide to create an equivalent, or even an improved, immunogenic variant or portion of a polypeptide of the invention, one skilled in the art will typically change one or more of the codons of the encoding DNA sequence according to Table 9.

[0998] For example, certain amino acids may be substituted for other amino acids in a protein structure without appreciable loss of interactive binding capacity with structures such as, for example, antigen-binding regions of antibodies or binding sites on substrate molecules. Since it is the interactive capacity and nature of a protein that defines that protein's biological functional activity, certain amino acid sequence substitutions can be made in a protein sequence, and, of course, its underlying DNA coding sequence, and nevertheless obtain a protein with like properties. It is thus contemplated that various changes may be made in the peptide sequences of the disclosed compositions, or corresponding DNA sequences which encode said peptides without appreciable loss of their biological utility or activity.

TABLE 9

| Amino Acids | | | Codons |
|---|---|---|---|
| Alanine | Ala | A | GCA GCC GCG GCU |
| Cysteine | Cys | C | UGC UGU |
| Aspartic acid | Asp | D | GAC GAU |
| Glutamic acid | Glu | E | GAA GAG |
| Phenylalanine | Phe | F | UUC UUU |
| Glycine | Gly | G | GGA GGC GGG GGU |
| Histidine | His | H | CAC CAU |
| Isoleucine | Ile | I | AUA AUG AUU |
| Lysine | Lys | K | AAA AAG |
| Leucine | Leu | L | UUA UUG CUA CUC CUG CUU |
| Methionine | Met | M | AUG |
| Asparagine | Asn | N | AAC AAU |
| Proline | Pro | P | CCA CCC CCG CCU |
| Glutamine | Gln | Q | CAA CAG |
| Arginine | Arg | R | AGA AGG CGA CGC CGG CGU |
| Serine | Ser | S | AGC AGU UCA UCC UCG UCU |
| Threonine | Thr | T | ACA ACC ACG ACU |
| Valine | Val | V | GUA GUC GUG GUU |
| Tryptophan | Trp | W | UGG |
| Tyrosine | Tyr | Y | UAC UAU |

[0999] In making such changes, the hydropathic index of amino acids may be considered. The importance of the hydropathic amino acid index in conferring interactive biologic function on a protein is generally understood in the art (Kyte and Doolittle, 1982, incorporated herein by reference). It is accepted that the relative hydropathic character of the amino acid contributes to the secondary structure of the resultant protein, which in turn defines the interaction of the protein with other molecules, for example, enzymes, substrates, receptors, DNA, antibodies, antigens, and the like. Each amino acid has been assigned a hydropathic index on the basis of its hydrophobicity and charge characteristics (Kyte and Doolittle, 1982). These values are: isoleucine (+4.5); valine (+4.2); leucine (+3.8); phenylalanine (+2.8); cysteine/cystine (+2.5); methionine (+1.9); alanine (+1.8); glycine (−0.4); threonine (−0.7); serine (−0.8); tryptophan (−0.9); tyrosine (−1.3); proline (−1.6); histidine (−3.2); glutamate (−3.5); glutamine (−3.5); aspartate (−3.5); asparagine (−3.5); lysine (−3.9); and arginine (−4.5).

[1000] It is known in the art that certain amino acids may be substituted by other amino acids having a similar hydropathic index or score and still result in a protein with similar biological activity, i.e. still obtain a biological functionally equivalent protein. In making such changes, the substitution of amino acids whose hydropathic indices are within ±2 is preferred, those within ±1 are particularly preferred, and those within ±0.5 are even more particularly preferred. It is also understood in the art that the substitution of like amino acids can be made effectively on the basis of hydrophilicity. U.S. Pat. No. 4,554,101 (specifically incorporated herein by reference in its entirety), states that the greatest local average hydrophilicity of a protein, as governed by the hydrophilicity of its adjacent amino acids, correlates with a biological property of the protein.

[1001] As detailed in U.S. Pat. No. 4,554,101, the following hydrophilicity values have been assigned to amino acid residues: arginine (+3.0); lysine (+3.0); aspartate (+3.0±1); glutamate (+3.0±1); serine (+0.3); asparagine (+0.2); glutamine (+0.2); glycine (0); threonine (−0.4); proline (−0.5±1); alanine (−0.5); histidine (−0.5); cysteine (−1.0); methionine (−1.3); valine (−1.5); leucine (−1.8); isoleucine (−1.8); tyrosine (−2.3); phenylalanine (−2.5); tryptophan (−3.4). It is understood that an amino acid can be substituted for another having a similar hydrophilicity value and still obtain a biologically equivalent, and in particular, an immunologically equivalent protein. In such changes, the substitution of amino acids whose hydrophilicity values are within ±2 is preferred, those within ±1 are particularly preferred, and those within ±0.5 are even more particularly preferred.

[1002] As outlined above, amino acid substitutions are generally therefore based on the relative similarity of the amino acid side-chain substituents, for example, their hydrophobicity, hydrophilicity, charge, size, and the like. Exemplary substitutions that take various of the foregoing characteristics into consideration are well known to those of skill in the art and include: arginine and lysine; glutamate and aspartate; serine and threonine; glutamine and asparagine; and valine, leucine and isoleucine.

[1003] In addition, any polynucleotide may be further modified to increase stability in vivo. Possible modifications include, but are not limited to, the addition of flanking sequences at the 5′ and/or 3′ ends; the use of phosphorothioate or 2′ O-methyl rather than phosphodiesterase linkages in the backbone; and/or the inclusion of nontraditional bases such as inosine, queosine and wybutosine, as well as acetyl- methyl-, thio- and other modified forms of adenine, cytidine, guanine, thymine and uridine.

[1004] Amino acid substitutions may further be made on the basis of similarity in polarity, charge, solubility, hydrophobicity, hydrophilicity and/or the amphipathic nature of the residues. For example, negatively charged amino acids include aspartic acid and glutamic acid; positively charged amino acids include lysine and arginine; and amino acids with uncharged polar head groups having similar hydrophilicity values include leucine, isoleucine and valine; glycine and alanine; asparagine and glutamine; and serine, threonine, phenylalanine and tyrosine. Other groups of amino acids that may represent conservative changes include: (1) ala, pro, gly, glu, asp, gln, asn, ser, thr; (2) cys, ser, tyr, thr; (3) val, ile, leu, met, ala, phe; (4) lys, arg, his; and (5) phe, tyr, trp, his. A variant may also, or alternatively, contain nonconservative changes. In a preferred embodiment, variant polypeptides differ from a native sequence by substitution, deletion or addition of five amino acids or fewer. Variants may also (or alternatively) be modified by, for example, the deletion or addition of amino acids that have minimal influence on the immunogenicity, secondary structure and hydropathic nature of the polypeptide.

[1005] As noted above, polypeptides may comprise a signal (or leader) sequence at the N-terminal end of the protein, which co-translationally or post-translationally directs transfer of the protein. The polypeptide may also be conjugated to a linker or other sequence for ease of synthesis, purification or identification of the polypeptide (e.g., poly-His), or to enhance binding of the polypeptide to a solid support. For example, a polypeptide may be conjugated to an immunoglobulin Fc region.

[1006] When comparing polypeptide sequences, two sequences are said to be “identical” if the sequence of amino acids in the two sequences is the same when aligned for maximum correspondence, as described below. Comparisons between two sequences are typically performed by comparing the sequences over a comparison window to identify and compare local regions of sequence similarity. A “comparison window” as used herein, refers to a segment of at least about 20 contiguous positions, usually 30 to about 75, 40 to about 50, in which a sequence may be compared to a reference sequence of the same number of contiguous positions after the two sequences are optimally aligned.

[1007] Optimal alignment of sequences for comparison may be conducted using the Megalign program in the Lasergene suite of bioinformatics software (DNASTAR, Inc., Madison, WI), using default parameters. This program embodies several alignment schemes described in the following references: Dayhoff, M. O. (1978) A model of evolutionary change in proteins—Matrices for detecting distant relationships. In Dayhoff, M. O. (ed.) Atlas of Protein Sequence and Structure, National Biomedical Research Foundation, Washington DC Vol. 5, Suppl. 3, pp. 345-358; Hein J. (1990) Unified Approach to Alignment and Phylogenes pp. 626-645 Methods in Enzymology vol. 183, Academic Press, Inc., San Diego, Calif.; Higgins, D. G. and Sharp, P. M. (1989) CABIOS 5:151-153; Myers, E. W. and Muller W. (1988) CABIOS 4:11-17; Robinson, E. D. (1971) Comb. Theor 11:105; Santou, N. Nes, M. (1987) Mol. Biol. Evol. 4:406-425; Sneath, P. H. A. and Sokal, R. R. (1973) Numerical Taxonomy—the Principles and Practice of Numerical Taxonomy, Freeman Press, San Francisco, Calif.; Wilbur, W. J. and Lipman, D. J. (1983) Proc. Natl. Acad., Sci. USA 80:726-730.

[1008] Alternatively, optimal alignment of sequences for comparison may be conducted by the local identity algorithm of Smith and Waterman (1981) Add. APL. Math 2:482, by the identity alignment algorithm of Needleman and Wunsch (1970) J. Mol. Biol. 48:443, by the search for similarity methods of Pearson and Lipman (1988) Proc. Natl. Acad. Sci. USA 85: 2444, by computerized implementations of these algorithms (GAP, BESTFIT, BLAST, FASTA, and TFASTA in the Wisconsin Genetics Software Package, Genetics Computer Group (GCG), 575 Science Dr., Madison, Wis.), or by inspection.

[1009] One preferred example of algorithms that are suitable for determining percent sequence identity and sequence similarity are the BLAST and BLAST 2.0 algorithms, which are described in Altschul et al. (1977) Nucl. Acids Res. 25:3389-3402 and Altschul et al. (1990) J. Mol. Biol. 215:403-410, respectively. BLAST and BLAST 2.0 can be used, for example with the parameters described herein, to determine percent sequence identity for the polynucleotides and polypeptides of the invention. Software for performing BLAST analyses is publicly available through the National Center for Biotechnology Information. For amino acid sequences, a scoring matrix can be used to calculate the cumulative score. Extension of the word hits in each direction are halted when: the cumulative alignment score falls off by the quantity X from its maximum achieved value; the cumulative score goes to zero or below, due to the accumulation of one or more negative-scoring residue alignments; or the end of either sequence is reached. The BLAST algorithm parameters W, T and X determine the sensitivity and speed of the alignment.

[1010] In one preferred approach, the “percentage of sequence identity” is determined by comparing two optimally aligned sequences over a window of comparison of at least 20 positions, wherein the portion of the polypeptide sequence in the comparison window may comprise additions or deletions (i.e., gaps) of 20 percent or less, usually 5 to 15 percent, or 10 to 12 percent, as compared to the reference sequences (which does not comprise additions or deletions) for optimal alignment of the two sequences. The percentage is calculated by determining the number of positions at which the identical amino acid residue occurs in both sequences to yield the number of matched positions, dividing the number of matched positions by the total number of positions in the reference sequence (i.e., the window size) and multiplying the results by 100 to yield the percentage of sequence identity.

[1011] Within other illustrative embodiments, a polypeptide may be a fusion polypeptide that comprises multiple polypeptides as described herein, or that comprises at least one polypeptide as described herein and an unrelated sequence, such as a known tumor protein. A fusion partner may, for example, assist in providing T helper epitopes (an immunological fusion partner), preferably T helper epitopes recognized by humans, or may assist in expressing the protein (an expression enhancer) at higher yields than the native recombinant protein. Certain preferred fusion partners are both immunological and expression enhancing fusion partners. Other fusion partners may be selected so as to increase the solubility of the polypeptide or to enable the polypeptide to be targeted to desired intracellular compartments. Still further fusion partners include affinity tags, which facilitate purification of the polypeptide.

[1012] Fusion polypeptides may generally be prepared using standard techniques, including chemical conjugation. Preferably, a fusion polypeptide is expressed as a recombinant polypeptide, allowing the production of increased levels, relative to a non-fused polypeptide, in an expression system. Briefly, DNA sequences encoding the polypeptide components may be assembled separately, and ligated into an appropriate expression vector. The 3′ end of the DNA sequence encoding one polypeptide component is ligated, with or without a peptide linker, to the 5′ end of a DNA sequence encoding the second polypeptide component so that the reading frames of the sequences are in phase. This permits translation into a single fusion polypeptide that retains the biological activity of both component polypeptides.

[1013] A peptide linker sequence may be employed to separate the first and second polypeptide components by a distance sufficient to ensure that each polypeptide folds into its secondary and tertiary structures. Such a peptide linker sequence is incorporated into the fusion polypeptide using standard techniques well known in the art. Suitable peptide linker sequences may be chosen based on the following factors: (1) their ability to adopt a flexible extended conformation; (2) their inability to adopt a secondary structure that could interact with functional epitopes on the first and second polypeptides; and (3) the lack of hydrophobic or charged residues that might react with the polypeptide functional epitopes. Preferred peptide linker sequences contain Gly, Asn and Ser residues. Other near neutral amino acids, such as Thr and Ala may also be used in the linker sequence. Amino acid sequences which may be usefully employed as linkers include those disclosed in Maratea et al., Gene 40:39-46, 1985; Murphy et al., Proc. Natl. Acad. Sci. USA 83:8258-8262, 1986; U.S. Pat. Nos. 4,935,233 and 4,751,180. The linker sequence may generally be from 1 to about 50 amino acids in length. Linker sequences are not required when the first and second polypeptides have non-essential N-terminal amino acid regions that can be used to separate the functional domains and prevent steric interference.

[1014] The ligated DNA sequences are operably linked to suitable transcriptional or translational regulatory elements. The regulatory elements responsible for expression of DNA are located only 5′ to the DNA sequence encoding the first polypeptides. Similarly, stop codons required to end translation and transcription termination signals are only present 3′ to the DNA sequence encoding the second polypeptide.

[1015] The fusion polypeptide can comprise a polypeptide as described herein together with an unrelated immunogenic protein, such as an immunogenic protein capable of eliciting a recall response. Examples of such proteins include tetanus, tuberculosis and hepatitis proteins (see, for example, Stoute et al. New Engl. J. Med., 336:86-91, 1997).

[1016] In one preferred embodiment, the immunological fusion partner is derived from a Mycobacterium sp., such as a Mycobacterium tuberculosis-derived Ra12 fragment. Ra12 compositions and methods for their use in enhancing the expression and/or immunogenicity of heterologous polynucleotide/polypeptide sequences is described in U.S. Patent Application No. 60/158,585, the disclosure of which is incorporated herein by reference in its entirety. Briefly, Ra12 refers to a polynucleotide region that is a subsequence of a Mycobacterium tuberculosis MTB32A nucleic acid. MTB32A is a serine protease of 32 KD molecular weight encoded by a gene in virulent and avirulent strains of M tuberculosis. The nucleotide sequence and amino acid sequence of MTB32A have been described (for example, U.S. Patent Application No. 60/158,585; see also, Skeiky et al., Infection and Immun. (1999) 67:3998-4007, incorporated herein by reference). Surprisingly, it was discovered that a 14KD C-terminal fragment of the MTB32A coding sequence expresses at high levels on its own and remains as a soluble polypeptide throughout the purification process. Moreover, this fragment may enhance the immunogenicity of heterologous antigenic polypeptides with which it is fused. This 14 KD C-terminal fragment is referred to herein as Ra12 and represents a fragment comprising some or all of amino acid residues 192 to 323 of MTB32A.

[1017] Recombinant nucleic acids which encode a fusion polypeptide comprising a Ra12 polypeptide and a heterologous lung tumor polypeptide of interest, can be readily constructed by conventional genetic engineering techniques. Recombinant nucleic acids are constructed so that, preferably, a Ra12 polynucleotide sequence is located 5′ to a selected heterologous lung tumor polynucleotide sequence. It may also be appropriate to place a Ra12 polynucleotide sequence 3′ to a selected heterologous polynucleotide sequence or to insert a heterologous polynucleotide sequence into a site within a Ra12 polynucleotide sequence.

[1018] In addition, any suitable polynucleotide that encodes a Ra12 or a portion or other variant thereof can be used in constructing recombinant fusion polynucleotides comprising Ra12 and one or more lung tumor polynucleotides disclosed herein. Preferred Ra12 polynucleotides generally comprise at least about 15 consecutive nucleotides, at least about 30 nucleotides, at least about 60 nucleotides, at least about 100 nucleotides, at least about 200 nucleotides, or at least about 300 nucleotides that encode a portion of a Ra12 polypeptide.

[1019] Ra12 polynucleotides may comprise a native sequence (i.e., an endogenous sequence that encodes a Ra12 polypeptide or a portion thereof) or may comprise a variant of such a sequence. Ra12 polynucleotide variants may contain one or more substitutions, additions, deletions and/or insertions such that the biological activity of the encoded fusion polypeptide is not substantially diminished, relative to a fusion polypeptide comprising a native Ra12 polypeptide. Variants preferably exhibit at least about 70% identity, more preferably at least about 80% identity and most preferably at least about 90% identity to a polynucleotide sequence that encodes a native Ra12 polypeptide or a portion thereof.

[1020] Within other preferred embodiments, an immunological fusion partner is derived from protein D, a surface protein of the gram-negative bacterium Haemophilus influenza B (WO 91/18926). Preferably, a protein D derivative comprises approximately the first third of the protein (e.g. the first N-terminal 100-110 amino acids), and a protein D derivative may be lipidated. Within certain preferred embodiments, the first 109 residues of a Lipoprotein D fusion partner is included on the N-terminus to provide the polypeptide with additional exogenous T-cell epitopes and to increase the expression level in E. coli (thus functioning as an expression enhancer). The lipid tail ensures optimal presentation of the antigen to antigen presenting cells. Other fusion partners include, the non-structural protein from influenzae virus, NS1 (hemaglutinin). Typically, the N-terminal 81 amino acids are used, although different fragments that include T-helper epitopes may be used.

[1021] In another embodiment, the immunological fusion partner is the protein known as LYTA, or a portion thereof (preferably a C-terminal portion). LYTA is derived from Streptococcus pneumoniae, which synthesizes an N-acetyl-L-alanine amidase known as amidase LYTA (encoded by the LytA gene; Gene 43:265-292, 1986). LYTA is an autolysin that specifically degrades certain bonds in the peptidoglycan backbone. The C-terminal domain of the LYTA protein is responsible for the affinity to the choline or to some choline analogues such as DEAE. This property has been exploited for the development of E. coli C-LYTA expressing plasmids useful for expression of fusion proteins. Purification of hybrid proteins containing the C-LYTA fragment at the amino terminus has been described (see Biotechnology 10:795-798, 1992). Within a preferred embodiment, a repeat portion of LYTA may be incorporated into a fusion polypeptide. A repeat portion is found in the C-terminal region starting at residue 178. A particularly preferred repeat portion incorporates residues 188-305.

[1022] Yet another illustrative embodiment involves fusion polypeptides, and the polynucleotides encoding them, wherein the fusion partner comprises a targeting signal capable of directing a polypeptide to the endosomal/lysosomal compartment, as described in U.S. Pat. No. 5,633,234. An immunogenic polypeptide of the invention, when fused with this targeting signal, will associate more efficiently with MHC class II molecules and thereby provide enhanced in vivo stimulation of CD4⁺ T-cells specific for the polypeptide.

[1023] Polypeptides of the invention are prepared using any of a variety of well known synthetic and/or recombinant techniques, the latter of which are further described below. Polypeptides, portions and other variants generally less than about 150 amino acids can be generated by synthetic means, using techniques well known to those of ordinary skill in the art. In one illustrative example, such polypeptides are synthesized using any of the commercially available solid-phase techniques, such as the Merrifield solid-phase synthesis method, where amino acids are sequentially added to a growing amino acid chain. See Merrifield, J. Am. Chem. Soc. 85:2149-2146, 1963. Equipment for automated synthesis of polypeptides is commercially available from suppliers such as Perkin Elmer/Applied BioSystems Division (Foster City, Calif.), and may be operated according to the manufacturer's instructions.

[1024] In general, polypeptide compositions (including fusion polypeptides) of the invention are isolated. An “isolated” polypeptide is one that is removed from its original environment. For example, a naturally-occurring protein or polypeptide is isolated if it is separated from some or all of the coexisting materials in the natural system. Preferably, such polypeptides are also purified, e.g., are at least about 90% pure, more preferably at least about 95% pure and most preferably at least about 99% pure.

[1025] Polynucleotide Compositions

[1026] The present invention, in other aspects, provides polynucleotide compositions. The terms “DNA” and “polynucleotide” are used essentially interchangeably herein to refer to a DNA molecule that has been isolated free of total genomic DNA of a particular species. “Isolated,” as used herein, means that a polynucleotide is substantially away from other coding sequences, and that the DNA molecule does not contain large portions of unrelated coding DNA, such as large chromosomal fragments or other functional genes or polypeptide coding regions. Of course, this refers to the DNA molecule as originally isolated, and does not exclude genes or coding regions later added to the segment by the hand of man.

[1027] As will be understood by those skilled in the art, the polynucleotide compositions of this invention can include genomic sequences, extra-genomic and plasmid-encoded sequences and smaller engineered gene segments that express, or may be adapted to express, proteins, polypeptides, peptides and the like. Such segments may be naturally isolated, or modified synthetically by the hand of man.

[1028] As will be also recognized by the skilled artisan, polynucleotides of the invention may be single-stranded (coding or antisense) or double-stranded, and may be DNA (genomic, cDNA or synthetic) or RNA molecules. RNA molecules may include HnRNA molecules, which contain introns and correspond to a DNA molecule in a one-to-one manner, and mRNA molecules, which do not contain introns. Additional coding or non-coding sequences may, but need not, be present within a polynucleotide of the present invention, and a polynucleotide may, but need not, be linked to other molecules and/or support materials.

[1029] Polynucleotides may comprise a native sequence (i.e., an endogenous sequence that encodes a polypeptide/protein of the invention or a portion thereof) or may comprise a sequence that encodes a variant or derivative, preferably and immunogenic variant or derivative, of such a sequence.

[1030] Therefore, according to another aspect of the present invention, polynucleotide compositions are provided that comprise some or all of a polynucleotide sequence set forth in any one of SEQ ID NOs:1-57, 59-323, 341-782, 784-785, 788,790, 792, 794, 796, 800-804, 807, 808, 810-826, 878-1382, 1384-1559, 1561-1664, 1668, 1669, 1676, 1680-1706, 1708-1732, 1734, 1736-1757, 1759-1765, 1767-1770, 1772-1774, 1776-1805, 1824, 1826-1829, 1865-1868, 1873, 1883 and 1884-1890, complements of a polynucleotide sequence set forth in any one of SEQ ID NOs:1-57, 59-323, 341-782, 784-785, 788,790, 792, 794, 796, 800-804, 807, 808, 810-826, 878-1382, 1384-1559, 1561-1664, 1668, 1669, 1676, 1680-1706, 1708-1732, 1734, 1736-1757, 1759-1765, 1767-1770, 1772-1774, 1776-1805, 1824, 1826-1829, 1865-1868, 1873, 1883 and 1884-1890, and degenerate variants of a polynucleotide sequence set forth in any one of SEQ ID NOs:1-57, 59-323, 341-782, 784-785, 788,790, 792, 794, 796, 800-804, 807, 808, 810-826, 878-1382, 1384-1559, 1561-1664, 1668, 1669, 1676, 1680-1706, 1708-1732, 1734, 1736-1757, 1759-1765, 1767-1770, 1772-1774, 1776-1805, 1824, 1826-1829, 1865-1868, 1873, 1883 and 1884-1890. In certain preferred embodiments, the polynucleotide sequences set forth herein encode immunogenic polypeptides, as described above.

[1031] In other related embodiments, the present invention provides polynucleotide variants having substantial identity to the sequences disclosed herein in SEQ ID NOs:1-57, 59-323, 341-782, 784-785, 788, 790, 792, 794, 796, 800-804, 807, 808, 810-826, 878-1382, 1384-1559, 1561-1664, 1668, 1669, 1676, 1680-1706, 1708-1732, 1734, 1736-1757, 1759-1765, 1767-1770, 1772-1774, 1776-1805, 1824, 1826-1829, 1865-1868, 1873, 1883 and 1884-1890, for example those comprising at least 70% sequence identity, preferably at least 75%, 80%, 85%, 90%, 95%, 96%, 97%, 98%, or 99% or higher, sequence identity compared to a polynucleotide sequence of this invention using the methods described herein, (e.g., BLAST analysis using standard parameters, as described below). One skilled in this art will recognize that these values can be appropriately adjusted to determine corresponding identity of proteins encoded by two nucleotide sequences by taking into account codon degeneracy, amino acid similarity, reading frame positioning and the like.

[1032] Typically, polynucleotide variants will contain one or more substitutions, additions, deletions and/or insertions, preferably such that the immunogenicity of the polypeptide encoded by the variant polynucleotide is not substantially diminished relative to a polypeptide encoded by a polynucleotide sequence specifically set forth herein). The term “variants” should also be understood to encompasses homologous genes of xenogenic origin.

[1033] In additional embodiments, the present invention provides polynucleotide fragments comprising various lengths of contiguous stretches of sequence identical to or complementary to one or more of the sequences disclosed herein. For example, polynucleotides are provided by this invention that comprise at least about 10, 15, 20, 30, 40, 50, 75, 100, 150, 200, 300, 400, 500 or 1000 or more contiguous nucleotides of one or more of the sequences disclosed herein as well as all intermediate lengths there between. It will be readily understood that “intermediate lengths”, in this context, means any length between the quoted values, such as 16, 17, 18, 19, etc.; 21, 22, 23, etc.; 30, 31, 32, etc.; 50, 51, 52, 53, etc.; 100, 101, 102, 103, etc.; 150, 151, 152, 153, etc.; including all integers through 200-500; 500-1,000, and the like.

[1034] In another embodiment of the invention, polynucleotide compositions are provided that are capable of hybridizing under moderate to high stringency conditions to a polynucleotide sequence provided herein, or a fragment thereof, or a complementary sequence thereof. Hybridization techniques are well known in the art of molecular biology. For purposes of illustration, suitable moderately stringent conditions for testing the hybridization of a polynucleotide of this invention with other polynucleotides include prewashing in a solution of 5× SSC, 0.5% SDS, 1.0 mM EDTA (pH 8.0); hybridizing at 50° C.-60° C., 5× SSC, overnight; followed by washing twice at 65° C. for 20 minutes with each of 2×, 0.5× and 0.2× SSC containing 0.1% SDS. One skilled in the art will understand that the stringency of hybridization can be readily manipulated, such as by altering the salt content of the hybridization solution and/or the temperature at which the hybridization is performed. For example, in another embodiment, suitable highly stringent hybridization conditions include those described above, with the exception that the temperature of hybridization is increased, e.g., to 60-65° C. or 65-70° C.

[1035] In certain preferred embodiments, the polynucleotides described above, e.g, polynucleotide variants, fragments and hybridizing sequences, encode polypeptides that are immunologically cross-reactive with a polypeptide sequence specifically set forth herein. In other preferred embodiments, such polynucleotides encode polypeptides that have a level of immunogenic activity of at least about 50%, preferably at least about 70%, and more preferably at least about 90% of that for a polypeptide sequence specifically set forth herein.

[1036] The polynucleotides of the present invention, or fragments thereof, regardless of the length of the coding sequence itself, may be combined with other DNA sequences, such as promoters, polyadenylation signals, additional restriction enzyme sites, multiple cloning sites, other coding segments, and the like, such that their overall length may vary considerably. It is therefore contemplated that a nucleic acid fragment of almost any length may be employed, with the total length preferably being limited by the ease of preparation and use in the intended recombinant DNA protocol. For example, illustrative polynucleotide segments with total lengths of about 10,000, about 5000, about 3000, about 2,000, about 1,000, about 500, about 200, about 100, about 50 base pairs in length, and the like, (including all intermediate lengths) are contemplated to be useful in many implementations of this invention.

[1037] When comparing polynucleotide sequences, two sequences are said to be “identical” if the sequence of nucleotides in the two sequences is the same when aligned for maximum correspondence, as described below. Comparisons between two sequences are typically performed by comparing the sequences over a comparison window to identify and compare local regions of sequence similarity. A “comparison window” as used herein, refers to a segment of at least about 20 contiguous positions, usually 30 to about 75, 40 to about 50, in which a sequence may be compared to a reference sequence of the same number of contiguous positions after the two sequences are optimally aligned.

[1038] Optimal alignment of sequences for comparison may be conducted using the Megalign program in the Lasergene suite of bioinformatics software (DNASTAR, Inc., Madison, Wis.), using default parameters. This program embodies several alignment schemes described in the following references: Dayhoff, M. O. (1978) A model of evolutionary change in proteins—Matrices for detecting distant relationships. In Dayhoff, M. O. (ed.) Atlas of Protein Sequence and Structure, National Biomedical Research Foundation, Washington DC Vol. 5, Suppl. 3, pp. 345-358;Hein J. (1990) Unified Approach to Alignment and Phylogenes pp. 626-645 Methods in Enzymology vol. 183, Academic Press, Inc., San Diego, Calif.; Higgins, D. G. and Sharp, P. M. (1989) CABIOS 5:151-153; Myers, E.W. and Muller W. (1988) CABIOS 4:11-17; Robinson, E. D. (1971) Comb. Theor 11:105; Santou, N. Nes, M. (1987) Mol. Biol. Evol. 4:406-425; Sneath, P. H. A. and Sokal, R. R. (1973) Numerical Taxonomy—the Principles and Practice of Numerical Taxonomy, Freeman Press, San Francisco, Calif.; Wilbur, W. J. and Lipman, D. J. (1983) Proc. Natl. Acad., Sci. USA 80:726-730.

[1039] Alternatively, optimal alignment of sequences for comparison may be conducted by the local identity algorithm of Smith and Waterman (1981) Add. APL. Math 2:482, by the identity alignment algorithm of Needleman and Wunsch (1970) J. Mol. Biol. 48:443, by the search for similarity methods of Pearson and Lipman (1988) Proc. Natl. Acad. Sci. USA 85: 2444, by computerized implementations of these algorithms (GAP, BESTFIT, BLAST, FASTA, and TFASTA in the Wisconsin Genetics Software Package, Genetics Computer Group (GCG), 575 Science Dr., Madison, Wis.), or by inspection.

[1040] One preferred example of algorithms that are suitable for determining percent sequence identity and sequence similarity are the BLAST and BLAST 2.0 algorithms, which are described in Altschul et al. (1977) Nucl. Acids Res. 25:3389-3402 and Altschul et al. (1990) J. Mol. Biol. 215:403-410, respectively. BLAST and BLAST 2.0 can be used, for example with the parameters described herein, to determine percent sequence identity for the polynucleotides of the invention. Software for performing BLAST analyses is publicly available through the National Center for Biotechnology Information. In one illustrative example, cumulative scores can be calculated using, for nucleotide sequences, the parameters M (reward score for a pair of matching residues; always >0) and N (penalty score for mismatching residues; always <0). Extension of the word hits in each direction are halted when: the cumulative alignment score falls off by the quantity X from its maximum achieved value; the cumulative score goes to zero or below, due to the accumulation of one or more negative-scoring residue alignments; or the end of either sequence is reached. The BLAST algorithm parameters W, T and X determine the sensitivity and speed of the alignment. The BLASTN program (for nucleotide sequences) uses as defaults a wordlength (W) of 11, and expectation (E) of 10, and the BLOSUM62 scoring matrix (see Henikoff and Henikoff (1989) Proc. Natl. Acad. Sci. USA 89:10915) alignments, (B) of 50, expectation (E) of 10, M=5, N=−4 and a comparison of both strands.

[1041] Preferably, the “percentage of sequence identity” is determined by comparing two optimally aligned sequences over a window of comparison of at least 20 positions, wherein the portion of the polynucleotide sequence in the comparison window may comprise additions or deletions (i.e., gaps) of 20 percent or less, usually 5 to 15 percent, or 10 to 12 percent, as compared to the reference sequences (which does not comprise additions or deletions) for optimal alignment of the two sequences. The percentage is calculated by determining the number of positions at which the identical nucleic acid bases occurs in both sequences to yield the number of matched positions, dividing the number of matched positions by the total number of positions in the reference sequence (i.e., the window size) and multiplying the results by 100 to yield the percentage of sequence identity.

[1042] It will be appreciated by those of ordinary skill in the art that, as a result of the degeneracy of the genetic code, there are many nucleotide sequences that encode a polypeptide as described herein. Some of these polynucleotides bear minimal homology to the nucleotide sequence of any native gene. Nonetheless, polynucleotides that vary due to differences in codon usage are specifically contemplated by the present invention. Further, alleles of the genes comprising the polynucleotide sequences provided herein are within the scope of the present invention. Alleles are endogenous genes that are altered as a result of one or more mutations, such as deletions, additions and/or substitutions of nucleotides. The resulting mRNA and protein may, but need not, have an altered structure or function. Alleles may be identified using standard techniques (such as hybridization, amplification and/or database sequence comparison).

[1043] Therefore, in another embodiment of the invention, a mutagenesis approach, such as site-specific mutagenesis, is employed for the preparation of immunogenic variants and/or derivatives of the polypeptides described herein. By this approach, specific modifications in a polypeptide sequence can be made through mutagenesis of the underlying polynucleotides that encode them. These techniques provides a straightforward approach to prepare and test sequence variants, for example, incorporating one or more of the foregoing considerations, by introducing one or more nucleotide sequence changes into the polynucleotide.

[1044] Site-specific mutagenesis allows the production of mutants through the use of specific oligonucleotide sequences which encode the DNA sequence of the desired mutation, as well as a sufficient number of adjacent nucleotides, to provide a primer sequence of sufficient size and sequence complexity to form a stable duplex on both sides of the deletion junction being traversed. Mutations may be employed in a selected polynucleotide sequence to improve, alter, decrease, modify, or otherwise change the properties of the polynucleotide itself, and/or alter the properties, activity, composition, stability, or primary sequence of the encoded polypeptide.

[1045] In certain embodiments of the present invention, the inventors contemplate the mutagenesis of the disclosed polynucleotide sequences to alter one or more properties of the encoded polypeptide, such as the immunogenicity of a polypeptide vaccine. The techniques of site-specific mutagenesis are well-known in the art, and are widely used to create variants of both polypeptides and polynucleotides. For example, site-specific mutagenesis is often used to alter a specific portion of a DNA molecule. In such embodiments, a primer comprising typically about 14 to about 25 nucleotides or so in length is employed, with about 5 to about 10 residues on both sides of the junction of the sequence being altered.

[1046] As will be appreciated by those of skill in the art, site-specific mutagenesis techniques have often employed a phage vector that exists in both a single stranded and double stranded form. Typical vectors useful in site-directed mutagenesis include vectors such as the M13 phage. These phage are readily commercially-available and their use is generally well-known to those skilled in the art. Double-stranded plasmids are also routinely employed in site directed mutagenesis that eliminates the step of transferring the gene of interest from a plasmid to a phage.

[1047] In general, site-directed mutagenesis in accordance herewith is performed by first obtaining a single-stranded vector or melting apart of two strands of a double-stranded vector that includes within its sequence a DNA sequence that encodes the desired peptide. An oligonucleotide primer bearing the desired mutated sequence is prepared, generally synthetically. This primer is then annealed with the single-stranded vector, and subjected to DNA polymerizing enzymes such as E. coli polymerase I Klenow fragment, in order to complete the synthesis of the mutation-bearing strand. Thus, a heteroduplex is formed wherein one strand encodes the original non-mutated sequence and the second strand bears the desired mutation. This heteroduplex vector is then used to transform appropriate cells, such as E. coli cells, and clones are selected which include recombinant vectors bearing the mutated sequence arrangement.

[1048] The preparation of sequence variants of the selected peptide-encoding DNA segments using site-directed mutagenesis provides a means of producing potentially useful species and is not meant to be limiting as there are other ways in which sequence variants of peptides and the DNA sequences encoding them may be obtained. For example, recombinant vectors encoding the desired peptide sequence may be treated with mutagenic agents, such as hydroxylamine, to obtain sequence variants. Specific details regarding these methods and protocols are found in the teachings of Maloy et al., 1994; Segal, 1976; Prokop and Bajpai, 1991; Kuby, 1994; and Maniatis et al., 1982, each incorporated herein by reference, for that purpose.

[1049] As used herein, the term “oligonucleotide directed mutagenesis procedure” refers to template-dependent processes and vector-mediated propagation which result in an increase in the concentration of a specific nucleic acid molecule relative to its initial concentration, or in an increase in the concentration of a detectable signal, such as amplification. As used herein, the term “oligonucleotide directed mutagenesis procedure” is intended to refer to a process that involves the template-dependent extension of a primer molecule. The term template dependent process refers to nucleic acid synthesis of an RNA or a DNA molecule wherein the sequence of the newly synthesized strand of nucleic acid is dictated by the well-known rules of complementary base pairing (see, for example, Watson, 1987). Typically, vector mediated methodologies involve the introduction of the nucleic acid fragment into a DNA or RNA vector, the clonal amplification of the vector, and the recovery of the amplified nucleic acid fragment. Examples of such methodologies are provided by U. S. Pat. No. 4,237,224, specifically incorporated herein by reference in its entirety.

[1050] In another approach for the production of polypeptide variants of the present invention, recursive sequence recombination, as described in U.S. Pat. No. 5,837,458, may be employed. In this approach, iterative cycles of recombination and screening or selection are performed to “evolve” individual polynucleotide variants of the invention having, for example, enhanced immunogenic activity.

[1051] In other embodiments of the present invention, the polynucleotide sequences provided herein can be advantageously used as probes or primers for nucleic acid hybridization. As such, it is contemplated that nucleic acid segments that comprise a sequence region of at least about 15 nucleotide long contiguous sequence that has the same sequence as, or is complementary to, a 15 nucleotide long contiguous sequence disclosed herein will find particular utility. Longer contiguous identical or complementary sequences, e.g., those of about 20, 30, 40, 50, 100, 200, 500, 1000 (including all intermediate lengths) and even up to full length sequences will also be of use in certain embodiments.

[1052] The ability of such nucleic acid probes to specifically hybridize to a sequence of interest will enable them to be of use in detecting the presence of complementary sequences in a given sample. However, other uses are also envisioned, such as the use of the sequence information for the preparation of mutant species primers, or primers for use in preparing other genetic constructions.

[1053] Polynucleotide molecules having sequence regions consisting of contiguous nucleotide stretches of 10-14, 15-20, 30, 50, or even of 100-200 nucleotides or so (including intermediate lengths as well), identical or complementary to a polynucleotide sequence disclosed herein, are particularly contemplated as hybridization probes for use in, e.g., Southern and Northern blotting. This would allow a gene product, or fragment thereof, to be analyzed, both in diverse cell types and also in various bacterial cells. The total size of fragment, as well as the size of the complementary stretch(es), will ultimately depend on the intended use or application of the particular nucleic acid segment. Smaller fragments will generally find use in hybridization embodiments, wherein the length of the contiguous complementary region may be varied, such as between about 15 and about 100 nucleotides, but larger contiguous complementarity stretches may be used, according to the length complementary sequences one wishes to detect.

[1054] The use of a hybridization probe of about 15-25 nucleotides in length allows the formation of a duplex molecule that is both stable and selective. Molecules having contiguous complementary sequences over stretches greater than 15 bases in length are generally preferred, though, in order to increase stability and selectivity of the hybrid, and thereby improve the quality and degree of specific hybrid molecules obtained. One will generally prefer to design nucleic acid molecules having gene-complementary stretches of 15 to 25 contiguous nucleotides, or even longer where desired.

[1055] Hybridization probes may be selected from any portion of any of the sequences disclosed herein. All that is required is to review the sequences set forth herein, or to any continuous portion of the sequences, from about 15-25 nucleotides in length up to and including the full length sequence, that one wishes to utilize as a probe or primer. The choice of probe and primer sequences may be governed by various factors. For example, one may wish to employ primers from towards the termini of the total sequence.

[1056] Small polynucleotide segments or fragments may be readily prepared by, for example, directly synthesizing the fragment by chemical means, as is commonly practiced using an automated oligonucleotide synthesizer. Also, fragments may be obtained by application of nucleic acid reproduction technology, such as the PCR™ technology of U.S. Pat. No. 4,683,202 (incorporated herein by reference), by introducing selected sequences into recombinant vectors for recombinant production, and by other recombinant DNA techniques generally known to those of skill in the art of molecular biology.

[1057] The nucleotide sequences of the invention may be used for their ability to selectively form duplex molecules with complementary stretches of the entire gene or gene fragments of interest. Depending on the application envisioned, one will typically desire to employ varying conditions of hybridization to achieve varying degrees of selectivity of probe towards target sequence. For applications requiring high selectivity, one will typically desire to employ relatively stringent conditions to form the hybrids, e.g., one will select relatively low salt and/or high temperature conditions, such as provided by a salt concentration of from about 0.02 M to about 0.15 M salt at temperatures of from about 50° C. to about 70° C. Such selective conditions tolerate little, if any, mismatch between the probe and the template or target strand, and would be particularly suitable for isolating related sequences.

[1058] Of course, for some applications, for example, where one desires to prepare mutants employing a mutant primer strand hybridized to an underlying template, less stringent (reduced stringency) hybridization conditions will typically be needed in order to allow formation of the heteroduplex. In these circumstances, one may desire to employ salt conditions such as those of from about 0.15 M to about 0.9 M salt, at temperatures ranging from about 20° C. to about 55° C. Cross-hybridizing species can thereby be readily identified as positively hybridizing signals with respect to control hybridizations. In any case, it is generally appreciated that conditions can be rendered more stringent by the addition of increasing amounts of formamide, which serves to destabilize the hybrid duplex in the same manner as increased temperature. Thus, hybridization conditions can be readily manipulated, and thus will generally be a method of choice depending on the desired results.

[1059] According to another embodiment of the present invention, polynucleotide compositions comprising antisense oligonucleotides are provided. Antisense oligonucleotides have been demonstrated to be effective and targeted inhibitors of protein synthesis, and, consequently, provide a therapeutic approach by which a disease can be treated by inhibiting the synthesis of proteins that contribute to the disease. The efficacy of antisense oligonucleotides for inhibiting protein synthesis is well established. For example, the synthesis of polygalactauronase and the muscarine type 2 acetylcholine receptor are inhibited by antisense oligonucleotides directed to their respective mRNA sequences (U. S. Pat. Nos. 5,739,119 and 5,759,829). Further, examples of antisense inhibition have been demonstrated with the nuclear protein cyclin, the multiple drug resistance gene (MDG1), ICAM-1, E-selectin, STK-1, striatal GABAA receptor and human EGF (Jaskulski et al., Science. 1988 Jun 10;240(4858):1544-6; Vasanthakumar and Ahmed, Cancer Commun. 1989;1(4):225-32; Peris et al., Brain Res Mol Brain Res. 1998 Jun 15;57(2):310-20; U.S. Pat. Nos. 5,801,154; 5,789,573; 5,718,709 and 5,610,288). Antisense constructs have also been described that inhibit and can be used to treat a variety of abnormal cellular proliferations, e.g. cancer (U.S. Pat. Nos. 5,747,470; 5,591,317 and 5,783,683).

[1060] Therefore, in certain embodiments, the present invention provides oligonucleotide sequences that comprise all, or a portion of, any sequence that is capable of specifically binding to polynucleotide sequence described herein, or a complement thereof. In one embodiment, the antisense oligonucleotides comprise DNA or derivatives thereof. In another embodiment, the oligonucleotides comprise RNA or derivatives thereof. In a third embodiment, the oligonucleotides are modified DNAs comprising a phosphorothioated modified backbone. In a fourth embodiment, the oligonucleotide sequences comprise peptide nucleic acids or derivatives thereof. In each case, preferred compositions comprise a sequence region that is complementary, and more preferably substantially-complementary, and even more preferably, completely complementary to one or more portions of polynucleotides disclosed herein. Selection of antisense compositions specific for a given gene sequence is based upon analysis of the chosen target sequence and determination of secondary structure, Tₘ, binding energy, and relative stability. Antisense compositions may be selected based upon their relative inability to form dimers, hairpins, or other secondary structures that would reduce or prohibit specific binding to the target mRNA in a host cell. Highly preferred target regions of the mRNA, are those which are at or near the AUG translation initiation codon, and those sequences which are substantially complementary to 5′ regions of the mRNA. These secondary structure analyses and target site selection considerations can be performed, for example, using v.4 of the OLIGO primer analysis software and/or the BLASTN 2.0.5 algorithm software (Altschul et al., Nucleic Acids Res. 1997, 25(17):3389-402).

[1061] The use of an antisense delivery method employing a short peptide vector, termed MPG (27 residues), is also contemplated. The MPG peptide contains a hydrophobic domain derived from the fusion sequence of HIV gp41 and a hydrophilic domain from the nuclear localization sequence of SV40 T-antigen (Morris et al., Nucleic Acids Res. 1997 Jul 15;25(14):2730-6). It has been demonstrated that several molecules of the MPG peptide coat the antisense oligonucleotides and can be delivered into cultured mammalian cells in less than 1 hour with relatively high efficiency (90%). Further, the interaction with MPG strongly increases both the stability of the oligonucleotide to nuclease and the ability to cross the plasma membrane.

[1062] According to another embodiment of the invention, the polynucleotide compositions described herein are used in the design and preparation of ribozyme molecules for inhibiting expression of the tumor polypeptides and proteins of the present invention in tumor cells. Ribozymes are RNA-protein complexes that cleave nucleic acids in a site-specific fashion. Ribozymes have specific catalytic domains that possess endonuclease activity (Kim and Cech, Proc Natl Acad Sci USA. December 1987;84(24):8788-92; Forster and Symons, Cell. Apr. 24, 1987;49(2):211-20). For example, a large number of ribozymes accelerate phosphoester transfer reactions with a high degree of specificity, often cleaving only one of several phosphoesters in an oligonucleotide substrate (Cech et al., Cell. December 1981;27(3 Pt 2):487-96; Michel and Westhof, J. Mol Biol. Dec. 5, 1990 ;216(3):585-610; Reinhold-Hurek and Shub, Nature. May 14, 1992;357(6374):173-6). This specificity has been attributed to the requirement that the substrate bind via specific base-pairing interactions to the internal guide sequence (“IGS”) of the ribozyme prior to chemical reaction.

[1063] Six basic varieties of naturally-occurring enzymatic RNAs are known presently. Each can catalyze the hydrolysis of RNA phosphodiester bonds in trans (and thus can cleave other RNA molecules) under physiological conditions. In general, enzymatic nucleic acids act by first binding to a target RNA. Such binding occurs through the target binding portion of a enzymatic nucleic acid which is held in close proximity to an enzymatic portion of the molecule that acts to cleave the target RNA. Thus, the enzymatic nucleic acid first recognizes and then binds a target RNA through complementary base-pairing, and once bound to the correct site, acts enzymatically to cut the target RNA. Strategic cleavage of such a target RNA will destroy its ability to direct synthesis of an encoded protein. After an enzymatic nucleic acid has bound and cleaved its RNA target, it is released from that RNA to search for another target and can repeatedly bind and cleave new targets.

[1064] The enzymatic nature of a ribozyme is advantageous over many technologies, such as antisense technology (where a nucleic acid molecule simply binds to a nucleic acid target to block its translation) since the concentration of ribozyme necessary to affect a therapeutic treatment is lower than that of an antisense oligonucleotide. This advantage reflects the ability of the ribozyme to act enzymatically. Thus, a single ribozyme molecule is able to cleave many molecules of target RNA. In addition, the ribozyme is a highly specific inhibitor, with the specificity of inhibition depending not only on the base pairing mechanism of binding to the target RNA, but also on the mechanism of target RNA cleavage. Single mismatches, or base-substitutions, near the site of cleavage can completely eliminate catalytic activity of a ribozyme. Similar mismatches in antisense molecules do not prevent their action (Woolf et al., Proc Natl Acad Sci USA. Aug. 15, 1992 ;89(16):7305-9). Thus, the specificity of action of a ribozyme is greater than that of an antisense oligonucleotide binding the same RNA site.

[1065] The enzymatic nucleic acid molecule may be formed in a hammerhead, hairpin, a hepatitis δ virus, group I intron or RNaseP RNA (in association with an RNA guide sequence) or Neurospora VS RNA motif. Examples of hammerhead motifs are described by Rossi et al. Nucleic Acids Res. Sep. 11, 1992;20(17):4559-65. Examples of hairpin motifs are described by Hampel et al. (Eur. Pat. Appl. Publ. No. EP 0360257), Hampel and Tritz, Biochemistry Jun. 13, 1989;28(12):4929-33;Hampel et al., Nucleic Acids Res. Jan. 25, 1990;18(2):299-304 and U.S. Pat. No. 5,631,359. An example of the hepatitis 8 virus motif is described by Perrotta and Been, Biochemistry. Dec. 1, 1992 ;31(47): 11843-52; an example of the RNaseP motif is described by Guerrier-Takada et al., Cell. December 1983;35(3 Pt 2):849-57; Neurospora VS RNA ribozyme motif is described by Collins (Saville and Collins, Cell. May 18, 1990;61(4):685-96; Saville and Collins, Proc Natl Acad Sci USA. Oct. 1, 1991;88(19):8826-30; Collins and Olive, Biochemistry. Mar. 23, 1993 ;32(11):2795-9); and an example of the Group I intron is described in (U. S. Pat. No. 4,987,071). All that is important in an enzymatic nucleic acid molecule of this invention is that it has a specific substrate binding site which is complementary to one or more of the target gene RNA regions, and that it have nucleotide sequences within or surrounding that substrate binding site which impart an RNA cleaving activity to the molecule. Thus the ribozyme constructs need not be limited to specific motifs mentioned herein.

[1066] Ribozymes may be designed as described in Int. Pat. Appl. Publ. No. WO 93/23569 and Int. Pat. Appl. Publ. No. WO 94/02595, each specifically incorporated herein by reference) and synthesized to be tested in vitro and in vivo, as described. Such ribozymes can also be optimized for delivery. While specific examples are provided, those in the art will recognize that equivalent RNA targets in other species can be utilized when necessary.

[1067] Ribozyme activity can be optimized by altering the length of the ribozyme binding arms, or chemically synthesizing ribozymes with modifications that prevent their degradation by serum ribonucleases (see e.g., Int. Pat. Appl. Publ. No. WO 92/07065; Int. Pat. Appl. Publ. No. WO 93/15187; Int. Pat. Appl. Publ. No. WO 91/03162; Eur. Pat. Appl. Publ. No. 92110298.4; U.S. Pat. No. 5,334,711; and Int. Pat. Appl. Publ. No. WO 94/13688, which describe various chemical modifications that can be made to the sugar moieties of enzymatic RNA molecules), modifications which enhance their efficacy in cells, and removal of stem II bases to shorten RNA synthesis times and reduce chemical requirements.

[1068] Sullivan et al. (Int. Pat. Appl. Publ. No. WO 94/02595) describes the general methods for delivery of enzymatic RNA molecules. Ribozymes may be administered to cells by a variety of methods known to those familiar to the art, including, but not restricted to, encapsulation in liposomes, by iontophoresis, or by incorporation into other vehicles, such as hydrogels, cyclodextrins, biodegradable nanocapsules, and bioadhesive microspheres. For some indications, ribozymes may be directly delivered ex vivo to cells or tissues with or without the aforementioned vehicles. Alternatively, the RNA/vehicle combination may be locally delivered by direct inhalation, by direct injection or by use of a catheter, infusion pump or stent. Other routes of delivery include, but are not limited to, intravascular, intramuscular, subcutaneous or joint injection, aerosol inhalation, oral (tablet or pill form), topical, systemic, ocular, intraperitoneal and/or intrathecal delivery. More detailed descriptions of ribozyme delivery and administration are provided in Int. Pat. Appl. Publ. No. WO 94/02595 and Int. Pat. Appl. Publ. No. WO 93/23569, each specifically incorporated herein by reference.

[1069] Another means of accumulating high concentrations of a ribozyme(s) within cells is to incorporate the ribozyme-encoding sequences into a DNA expression vector. Transcription of the ribozyme sequences are driven from a promoter for eukaryotic RNA polymerase I (pol I), RNA polymerase II (pol II), or RNA polymerase III (pol III). Transcripts from pol II or pol III promoters will be expressed at high levels in all cells; the levels of a given pol II promoter in a given cell type will depend on the nature of the gene regulatory sequences (enhancers, silencers, etc.) present nearby. Prokaryotic RNA polymerase promoters may also be used, providing that the prokaryotic RNA polymerase enzyme is expressed in the appropriate cells Ribozymes expressed from such promoters have been shown to function in mammalian cells. Such transcription units can be incorporated into a variety of vectors for introduction into mammalian cells, including but not restricted to, plasmid DNA vectors, viral DNA vectors (such as adenovirus or adeno-associated vectors), or viral RNA vectors (such as retroviral, semliki forest virus, sindbis virus vectors).

[1070] In another embodiment of the invention, peptide nucleic acids (PNAs) compositions are provided. PNA is a DNA mimic in which the nucleobases are attached to a pseudopeptide backbone (Good and Nielsen, Antisense Nucleic Acid Drug Dev. 1997 7(4) 431-37). PNA is able to be utilized in a number methods that traditionally have used RNA or DNA. Often PNA sequences perform better in techniques than the corresponding RNA or DNA sequences and have utilities that are not inherent to RNA or DNA. A review of PNA including methods of making, characteristics of, and methods of using, is provided by Corey (Trends Biotechnol June 1997;15(6):224-9). As such, in certain embodiments, one may prepare PNA sequences that are complementary to one or more portions of the ACE mRNA sequence, and such PNA compositions may be used to regulate, alter, decrease, or reduce the translation of ACE-specific mRNA, and thereby alter the level of ACE activity in a host cell to which such PNA compositions have been administered.

[1071] PNAs have 2-aminoethyl-glycine linkages replacing the normal phosphodiester backbone of DNA (Nielsen et al., Science Dec. 6, 1991;254(5037):1497-500;Hanvey et al., Science. Nov. 27, 1992;258(5087):1481-5;Hyrup and Nielsen, Bioorg Med Chem. January 1996;4(1):5-23). This chemistry has three important consequences: firstly, in contrast to DNA or phosphorothioate oligonucleotides, PNAs are neutral molecules; secondly, PNAs are achiral, which avoids the need to develop a stereoselective synthesis; and thirdly, PNA synthesis uses standard Boc or Fmoc protocols for solid-phase peptide synthesis, although other methods, including a modified Merrifield method, have been used.

[1072] PNA monomers or ready-made oligomers are commercially available from PerSeptive Biosystems (Framingham, Mass.). PNA syntheses by either Boc or Fmoc protocols are straightforward using manual or automated protocols (Norton et al., Bioorg Med Chem. April 1995;3(4):437-45). The manual protocol lends itself to the production of chemically modified PNAs or the simultaneous synthesis of families of closely related PNAs.

[1073] As with peptide synthesis, the success of a particular PNA synthesis will depend on the properties of the chosen sequence. For example, while in theory PNAs can incorporate any combination of nucleotide bases, the presence of adjacent purines can lead to deletions of one or more residues in the product. In expectation of this difficulty, it is suggested that, in producing PNAs with adjacent purines, one should repeat the coupling of residues likely to be added inefficiently. This should be followed by the purification of PNAs by reverse-phase high-pressure liquid chromatography, providing yields and purity of product similar to those observed during the synthesis of peptides.

[1074] Modifications of PNAs for a given application may be accomplished by coupling amino acids during solid-phase synthesis or by attaching compounds that contain a carboxylic acid group to the exposed N-terminal amine. Alternatively, PNAs can be modified after synthesis by coupling to an introduced lysine or cysteine. The ease with which PNAs can be modified facilitates optimization for better solubility or for specific functional requirements. Once synthesized, the identity of PNAs and their derivatives can be confirmed by mass spectrometry. Several studies have made and utilized modifications of PNAs (for example, Norton et al., Bioorg Med Chem. April 1995;3(4):437-45; Petersen et al., J. Pept Sci. May-June 1995;1(3):175-83; Orum et al., Biotechniques. September 1995 ;19(3):472-80; Footer et al., Biochemistry. Aug. 20, 1996;35(33):10673-9; Griffith et al., Nucleic Acids Res. Aug. 11, 1995;23(15):3003-8; Pardridge et al., Proc Natl Acad Sci U S A. Jun. 6, 1995;92(12):5592-6; Boffa et al., Proc Natl Acad Sci USA. Mar. 14, 1995 ;92(6):1901-5; Gambacorti-Passerini et al., Blood. Aug. 15, 1996;88(4):1411-7; Armitage et al., Proc Natl Acad Sci USA. Nov. 11, 1997;94(23):12320-5; Seeger et al., Biotechniques September. 1997;23(3):512-7). U.S. Pat. No. 5,700,922 discusses PNA-DNA-PNA chimeric molecules and their uses in diagnostics, modulating protein in organisms, and treatment of conditions susceptible to therapeutics.

[1075] Methods of characterizing the antisense binding properties of PNAs are discussed in Rose (Anal Chem. Dec. 15, 1993;65(24):3545-9) and Jensen et al. (Biochemistry. 1997 Apr 22;36(16):5072-7). Rose uses capillary gel electrophoresis to determine binding of PNAs to their complementary oligonucleotide, measuring the relative binding kinetics and stoichiometry. Similar types of measurements were made by Jensen et al. using BIAcore™ technology.

[1076] Other applications of PNAs that have been described and will be apparent to the skilled artisan include use in DNA strand invasion, antisense inhibition, mutational analysis, enhancers of transcription, nucleic acid purification, isolation of transcriptionally active genes, blocking of transcription factor binding, genome cleavage, biosensors, in situ hybridization, and the like.

[1077] Polynucleotide Identification, Characterization and Expression

[1078] Polynucleotides compositions of the present invention may be identified, prepared and/or manipulated using any of a variety of well established techniques (see generally, Sambrook et al., Molecular Cloning: A Laboratory Manual, Cold Spring Harbor Laboratories, Cold Spring Harbor, N.Y., 1989, and other like references). For example, a polynucleotide may be identified, as described in more detail below, by screening a microarray of cDNAs for tumor-associated expression (i.e., expression that is at least two fold greater in a tumor than in normal tissue, as determined using a representative assay provided herein). Such screens may be performed, for example, using the microarray technology of Affymetrix, Inc. (Santa Clara, Calif.) according to the manufacturer's instructions (and essentially as described by Schena et al., Proc. Natl. Acad. Sci. USA 93:10614-10619, 1996 and Heller et al., Proc. Natl. Acad. Sci. USA 94:2150-2155, 1997). Alternatively, polynucleotides may be amplified from cDNA prepared from cells expressing the proteins described herein, such as tumor cells.

[1079] Many template dependent processes are available to amplify a target sequences of interest present in a sample. One of the best known amplification methods is the polymerase chain reaction (PCR™) which is described in detail in U.S. Pat. Nos. 4,683,195, 4,683,202 and 4,800,159, each of which is incorporated herein by reference in its entirety. Briefly, in PCR™, two primer sequences are prepared which are complementary to regions on opposite complementary strands of the target sequence. An excess of deoxynucleoside triphosphates is added to a reaction mixture along with a DNA polymerase (e.g., Taq polymerase). If the target sequence is present in a sample, the primers will bind to the target and the polymerase will cause the primers to be extended along the target sequence by adding on nucleotides. By raising and lowering the temperature of the reaction mixture, the extended primers will dissociate from the target to form reaction products, excess primers will bind to the target and to the reaction product and the process is repeated. Preferably reverse transcription and PCR™ amplification procedure may be performed in order to quantify the amount of mRNA amplified. Polymerase chain reaction methodologies are well known in the art.

[1080] Any of a number of other template dependent processes, many of which are variations of the PCR™ amplification technique, are readily known and available in the art. Illustratively, some such methods include the ligase chain reaction (referred to as LCR), described, for example, in Eur. Pat. Appl. Publ. No. 320,308 and U.S. Pat. No. 4,883,750; Qbeta Replicase, described in PCT Intl. Pat. Appl. Publ. No. PCT/US87/00880; Strand Displacement Amplification (SDA) and Repair Chain Reaction (RCR). Still other amplification methods are described in Great Britain Pat. Appl. No. 2 202 328, and in PCT Intl. Pat. Appl. Publ. No. PCT/US89/01025. Other nucleic acid amplification procedures include transcription-based amplification systems (TAS) (PCT Intl. Pat. Appl. Publ. No. WO 88/10315), including nucleic acid sequence based amplification (NASBA) and 3SR. Eur. Pat. Appl. Publ. No. 329,822 describes a nucleic acid amplification process involving cyclically synthesizing single-stranded RNA (“ssRNA”), ssDNA, and double-stranded DNA (dsDNA). PCT Intl. Pat. Appl. Publ. No. WO 89/06700 describes a nucleic acid sequence amplification scheme based on the hybridization of a promoter/primer sequence to a target single-stranded DNA (“ssDNA”) followed by transcription of many RNA copies of the sequence. Other amplification methods such as “RACE” (Frohman, 1990), and “one-sided PCR” (Ohara, 1989) are also well-known to those of skill in the art.

[1081] An amplified portion of a polynucleotide of the present invention may be used to isolate a full length gene from a suitable library (e.g., a tumor cDNA library) using well known techniques. Within such techniques, a library (cDNA or genomic) is screened using one or more polynucleotide probes or primers suitable for amplification. Preferably, a library is size-selected to include larger molecules. Random primed libraries may also be preferred for identifying 5′ and upstream regions of genes. Genomic libraries are preferred for obtaining introns and extending 5′ sequences.

[1082] For hybridization techniques, a partial sequence may be labeled (e.g., by nick-translation or end-labeling with ³²P) using well known techniques. A bacterial or bacteriophage library is then generally screened by hybridizing filters containing denatured bacterial colonies (or lawns containing phage plaques) with the labeled probe (see Sambrook et al., Molecular Cloning: A Laboratory Manual, Cold Spring Harbor Laboratories, Cold Spring Harbor, N.Y., 1989). Hybridizing colonies or plaques are selected and expanded, and the DNA is isolated for further analysis. cDNA clones may be analyzed to determine the amount of additional sequence by, for example, PCR using a primer from the partial sequence and a primer from the vector. Restriction maps and partial sequences may be generated to identify one or more overlapping clones. The complete sequence may then be determined using standard techniques, which may involve generating a series of deletion clones. The resulting overlapping sequences can then assembled into a single contiguous sequence. A full length cDNA molecule can be generated by ligating suitable fragments, using well known techniques.

[1083] Alternatively, amplification techniques, such as those described above, can be useful for obtaining a full length coding sequence from a partial cDNA sequence. One such amplification technique is inverse PCR (see Triglia et al., Nucl. Acids Res. 16:8186, 1988), which uses restriction enzymes to generate a fragment in the known region of the gene. The fragment is then circularized by intramolecular ligation and used as a template for PCR with divergent primers derived from the known region. Within an alternative approach, sequences adjacent to a partial sequence may be retrieved by amplification with a primer to a linker sequence and a primer specific to a known region. The amplified sequences are typically subjected to a second round of amplification with the same linker primer and a second primer specific to the known region. A variation on this procedure, which employs two primers that initiate extension in opposite directions from the known sequence, is described in WO 96/38591. Another such technique is known as “rapid amplification of cDNA ends” or RACE. This technique involves the use of an internal primer and an external primer, which hybridizes to a polyA region or vector sequence, to identify sequences that are 5′ and 3′ of a known sequence. Additional techniques include capture PCR (Lagerstrom et al., PCR Methods Applic. 1:111-19, 1991) and walking PCR (Parker et al., Nucl. Acids. Res. 19:3055-60, 1991). Other methods employing amplification may also be employed to obtain a full length cDNA sequence.

[1084] In certain instances, it is possible to obtain a full length cDNA sequence by analysis of sequences provided in an expressed sequence tag (EST) database, such as that available from GenBank. Searches for overlapping ESTs may generally be performed using well known programs (e.g., NCBI BLAST searches), and such ESTs may be used to generate a contiguous full length sequence. Full length DNA sequences may also be obtained by analysis of genomic fragments.

[1085] In other embodiments of the invention, polynucleotide sequences or fragments thereof which encode polypeptides of the invention, or fusion proteins or functional equivalents thereof, may be used in recombinant DNA molecules to direct expression of a polypeptide in appropriate host cells. Due to the inherent degeneracy of the genetic code, other DNA sequences that encode substantially the same or a functionally equivalent amino acid sequence may be produced and these sequences may be used to clone and express a given polypeptide.

[1086] As will be understood by those of skill in the art, it may be advantageous in some instances to produce polypeptide-encoding nucleotide sequences possessing non-naturally occurring codons. For example, codons preferred by a particular prokaryotic or eukaryotic host can be selected to increase the rate of protein expression or to produce a recombinant RNA transcript having desirable properties, such as a half-life which is longer than that of a transcript generated from the naturally occurring sequence.

[1087] Moreover, the polynucleotide sequences of the present invention can be engineered using methods generally known in the art in order to alter polypeptide encoding sequences for a variety of reasons, including but not limited to, alterations which modify the cloning, processing, and/or expression of the gene product. For example, DNA shuffling by random fragmentation and PCR reassembly of gene fragments and synthetic oligonucleotides may be used to engineer the nucleotide sequences. In addition, site-directed mutagenesis may be used to insert new restriction sites, alter glycosylation patterns, change codon preference, produce splice variants, or introduce mutations, and so forth.

[1088] In another embodiment of the invention, natural, modified, or recombinant nucleic acid sequences may be ligated to a heterologous sequence to encode a fusion protein. For example, to screen peptide libraries for inhibitors of polypeptide activity, it may be useful to encode a chimeric protein that can be recognized by a commercially available antibody. A fusion protein may also be engineered to contain a cleavage site located between the polypeptide-encoding sequence and the heterologous protein sequence, so that the polypeptide may be cleaved and purified away from the heterologous moiety.

[1089] Sequences encoding a desired polypeptide may be synthesized, in whole or in part, using chemical methods well known in the art (see Caruthers, M. H. et al. (1980) Nucl. Acids Res. Symp. Ser. 215-223,Horn, T. et al. (1980) Nucl. Acids Res. Symp. Ser. 225-232). Alternatively, the protein itself may be produced using chemical methods to synthesize the amino acid sequence of a polypeptide, or a portion thereof. For example, peptide synthesis can be performed using various solid-phase techniques (Roberge, J. Y. et al. (1995) Science 269:202-204) and automated synthesis may be achieved, for example, using the ABI 431A Peptide Synthesizer (Perkin Elmer, Palo Alto, Calif.).

[1090] A newly synthesized peptide may be substantially purified by preparative high performance liquid chromatography (e.g., Creighton, T. (1983) Proteins, Structures and Molecular Principles, WH Freeman and Co., New York, N.Y.) or other comparable techniques available in the art. The composition of the synthetic peptides may be confirmed by amino acid analysis or sequencing (e.g., the Edman degradation procedure). Additionally, the amino acid sequence of a polypeptide, or any part thereof, may be altered during direct synthesis and/or combined using chemical methods with sequences from other proteins, or any part thereof, to produce a variant polypeptide.

[1091] In order to express a desired polypeptide, the nucleotide sequences encoding the polypeptide, or functional equivalents, may be inserted into appropriate expression vector, i.e., a vector which contains the necessary elements for the transcription and translation of the inserted coding sequence. Methods which are well known to those skilled in the art may be used to construct expression vectors containing sequences encoding a polypeptide of interest and appropriate transcriptional and translational control elements. These methods include in vitro recombinant DNA techniques, synthetic techniques, and in vivo genetic recombination. Such techniques are described, for example, in Sambrook, J. et al. (1989) Molecular Cloning, A Laboratory Manual, Cold Spring Harbor Press, Plainview, N.Y., and Ausubel, F. M. et al. (1989) Current Protocols in Molecular Biology, John Wiley & Sons, New York. N.Y.

[1092] A variety of expression vector/host systems may be utilized to contain and express polynucleotide sequences. These include, but are not limited to, microorganisms such as bacteria transformed with recombinant bacteriophage, plasmid, or cosmid DNA expression vectors; yeast transformed with yeast expression vectors; insect cell systems infected with virus expression vectors (e.g., baculovirus); plant cell systems transformed with virus expression vectors (e.g., cauliflower mosaic virus, CaMV; tobacco mosaic virus, TMV) or with bacterial expression vectors (e.g., Ti or pBR322 plasmids); or animal cell systems.

[1093] The “control elements” or “regulatory sequences” present in an expression vector are those non-translated regions of the vector—enhancers, promoters, 5′ and 3′ untranslated regions—which interact with host cellular proteins to carry out transcription and translation. Such elements may vary in their strength and specificity. Depending on the vector system and host utilized, any number of suitable transcription and translation elements, including constitutive and inducible promoters, may be used. For example, when cloning in bacterial systems, inducible promoters such as the hybrid lacZ promoter of the PBLUESCRIPT phagemid (Stratagene, La Jolla, Calif.) or PSPORT1 plasmid (Gibco BRL, Gaithersburg, Md.) and the like may be used. In mammalian cell systems, promoters from mammalian genes or from mammalian viruses are generally preferred. If it is necessary to generate a cell line that contains multiple copies of the sequence encoding a polypeptide, vectors based on SV40 or EBV may be advantageously used with an appropriate selectable marker.

[1094] In bacterial systems, any of a number of expression vectors may be selected depending upon the use intended for the expressed polypeptide. For example, when large quantities are needed, for example for the induction of antibodies, vectors which direct high level expression of fusion proteins that are readily purified may be used. Such vectors include, but are not limited to, the multifunctional E. coli cloning and expression vectors such as BLUESCRIPT (Stratagene), in which the sequence encoding the polypeptide of interest may be ligated into the vector in frame with sequences for the amino-terminal Met and the subsequent 7 residues of .beta.-galactosidase so that a hybrid protein is produced; pIN vectors (Van Heeke, G. and S. M. Schuster (1989) J. Biol. Chem. 264:5503-5509); and the like. pGEX Vectors (Promega, Madison, Wis.) may also be used to express foreign polypeptides as fusion proteins with glutathione S-transferase (GST). In general, such fusion proteins are soluble and can easily be purified from lysed cells by adsorption to glutathione-agarose beads followed by elution in the presence of free glutathione. Proteins made in such systems may be designed to include heparin, thrombin, or factor XA protease cleavage sites so that the cloned polypeptide of interest can be released from the GST moiety at will.

[1095] In the yeast, Saccharomyces cerevisiae, a number of vectors containing constitutive or inducible promoters such as alpha factor, alcohol oxidase, and PGH may be used. For reviews, see Ausubel et al. (supra) and Grant et al. (1987) Methods Enzymol. 153:516-544.

[1096] In cases where plant expression vectors are used, the expression of sequences encoding polypeptides may be driven by any of a number of promoters. For example, viral promoters such as the 35S and 19S promoters of CaMV may be used alone or in combination with the omega leader sequence from TMV (Takamatsu, N. (1987) EMBO J. 6:307-311. Alternatively, plant promoters such as the small subunit of RUBISCO or heat shock promoters may be used (Coruzzi, G. et al. (1984) EMBO J 3:1671-1680; Broglie, R. et al. (1984) Science 224:838-843; and Winter, J. et al. (1991) Results Probl. Cell Differ. 17:85-105). These constructs can be introduced into plant cells by direct DNA transformation or pathogen-mediated transfection. Such techniques are described in a number of generally available reviews (see, for example, Hobbs, S. or Murry, L. E. in McGraw Hill Yearbook of Science and Technology (1992) McGraw Hill, New York, N.Y.; pp. 191-196).

[1097] An insect system may also be used to express a polypeptide of interest. For example, in one such system, Autographa californica nuclear polyhedrosis virus (AcNPV) is used as a vector to express foreign genes in Spodoptera frugiperda cells or in Trichoplusia larvae. The sequences encoding the polypeptide may be cloned into a non-essential region of the virus, such as the polyhedrin gene, and placed under control of the polyhedrin promoter. Successful insertion of the polypeptide-encoding sequence will render the polyhedrin gene inactive and produce recombinant virus lacking coat protein. The recombinant viruses may then be used to infect, for example, S. frugiperda cells or Trichoplusia larvae in which the polypeptide of interest may be expressed (Engelhard, E. K. et al. (1994) Proc. Natl. Acad. Sci. 91 :3224-3227).

[1098] In mammalian host cells, a number of viral-based expression systems are generally available. For example, in cases where an adenovirus is used as an expression vector, sequences encoding a polypeptide of interest may be ligated into an adenovirus transcription/translation complex consisting of the late promoter and tripartite leader sequence. Insertion in a non-essential E1 or E3 region of the viral genome may be used to obtain a viable virus which is capable of expressing the polypeptide in infected host cells (Logan, J. and Shenk, T. (1984) Proc. Natl. Acad. Sci. 81:3655-3659). In addition, transcription enhancers, such as the Rous sarcoma virus (RSV) enhancer, may be used to increase expression in mammalian host cells.

[1099] Specific initiation signals may also be used to achieve more efficient translation of sequences encoding a polypeptide of interest. Such signals include the ATG initiation codon and adjacent sequences. In cases where sequences encoding the polypeptide, its initiation codon, and upstream sequences are inserted into the appropriate expression vector, no additional transcriptional or translational control signals may be needed. However, in cases where only coding sequence, or a portion thereof, is inserted, exogenous translational control signals including the ATG initiation codon should be provided. Furthermore, the initiation codon should be in the correct reading frame to ensure translation of the entire insert. Exogenous translational elements and initiation codons may be of various origins, both natural and synthetic. The efficiency of expression may be enhanced by the inclusion of enhancers which are appropriate for the particular cell system which is used, such as those described in the literature (Scharf, D. et al. (1994) Results Probl. Cell Differ. 20:125-162).

[1100] In addition, a host cell strain may be chosen for its ability to modulate the expression of the inserted sequences or to process the expressed protein in the desired fashion. Such modifications of the polypeptide include, but are not limited to, acetylation, carboxylation. glycosylation, phosphorylation, lipidation, and acylation. Post-translational processing which cleaves a “prepro” form of the protein may also be used to facilitate correct insertion, folding and/or function. Different host cells such as CHO, COS, HeLa, MDCK, HEK293, and W138, which have specific cellular machinery and characteristic mechanisms for such post-translational activities, may be chosen to ensure the correct modification and processing of the foreign protein.

[1101] For long-term, high-yield production of recombinant proteins, stable expression is generally preferred. For example, cell lines which stably express a polynucleotide of interest may be transformed using expression vectors which may contain viral origins of replication and/or endogenous expression elements and a selectable marker gene on the same or on a separate vector. Following the introduction of the vector, cells may be allowed to grow for 1-2 days in an enriched media before they are switched to selective media. The purpose of the selectable marker is to confer resistance to selection, and its presence allows growth and recovery of cells which successfully express the introduced sequences. Resistant clones of stably transformed cells may be proliferated using tissue culture techniques appropriate to the cell type.

[1102] Any number of selection systems may be used to recover transformed cell lines. These include, but are not limited to, the herpes simplex virus thymidine kinase (Wigler, M. et al. (1977) Cell 11:223-32) and adenine phosphoribosyltransferase (Lowy, I. et al. (1990) Cell 22:817-23) genes which can be employed in tk.sup.- or aprt.sup.- cells, respectively. Also, antimetabolite, antibiotic or herbicide resistance can be used as the basis for selection; for example, dhfr which confers resistance to methotrexate (Wigler, M. et al. (1980) Proc. Natl. Acad. Sci. 77:3567-70); npt, which confers resistance to the aminoglycosides, neomycin and G-418 (Colbere-Garapin, F. et al (1981) J. Mol. Biol. 150:1-14); and als or pat, which confer resistance to chlorsulfuron and phosphinotricin acetyltransferase, respectively (Murry, supra). Additional selectable genes have been described, for example, trpB, which allows cells to utilize indole in place of tryptophan, or hisD, which allows cells to utilize histinol in place of histidine (Hartman, S. C. and R. C. Mulligan (1988) Proc. Natl. Acad. Sci. 85:8047-51). The use of visible markers has gained popularity with such markers as anthocyanins, beta-glucuronidase and its substrate GUS, and luciferase and its substrate luciferin, being widely used not only to identify transformants, but also to quantify the amount of transient or stable protein expression attributable to a specific vector system (Rhodes, C. A. et al. (1995) Methods Mol. Biol. 55:121-131).

[1103] Although the presence/absence of marker gene expression suggests that the gene of interest is also present, its presence and expression may need to be confirmed. For example, if the sequence encoding a polypeptide is inserted within a marker gene sequence, recombinant cells containing sequences can be identified by the absence of marker gene function. Alternatively, a marker gene can be placed in tandem with a polypeptide-encoding sequence under the control of a single promoter. Expression of the marker gene in response to induction or selection usually indicates expression of the tandem gene as well.

[1104] Alternatively, host cells that contain and express a desired polynucleotide sequence may be identified by a variety of procedures known to those of skill in the art. These procedures include, but are not limited to, DNA-DNA or DNA-RNA hybridizations and protein bioassay or immunoassay techniques which include, for example, membrane, solution, or chip based technologies for the detection and/or quantification of nucleic acid or protein.

[1105] A variety of protocols for detecting and measuring the expression of polynucleotide-encoded products, using either polyclonal or monoclonal antibodies specific for the product are known in the art. Examples include enzyme-linked immunosorbent assay (ELISA), radioimmunoassay (RIA), and fluorescence activated cell sorting (FACS). A two-site, monoclonal-based immunoassay utilizing monoclonal antibodies reactive to two non-interfering epitopes on a given polypeptide may be preferred for some applications, but a competitive binding assay may also be employed. These and other assays are described, among other places, in Hampton, R. et al. (1990; Serological Methods, a Laboratory Manual, APS Press, St Paul. Minn.) and Maddox, D. E. et al. (1983; J. Exp. Med. 158:1211-1216).

[1106] A wide variety of labels and conjugation techniques are known by those skilled in the art and may be used in various nucleic acid and amino acid assays. Means for producing labeled hybridization or PCR probes for detecting sequences related to polynucleotides include oligolabeling, nick translation, end-labeling or PCR amplification using a labeled nucleotide. Alternatively, the sequences, or any portions thereof may be cloned into a vector for the production of an mRNA probe. Such vectors are known in the art, are commercially available, and may be used to synthesize RNA probes in vitro by addition of an appropriate RNA polymerase such as T7, T3, or SP6 and labeled nucleotides. These procedures may be conducted using a variety of commercially available kits. Suitable reporter molecules or labels, which may be used include radionuclides, enzymes, fluorescent, chemiluminescent, or chromogenic agents as well as substrates, cofactors, inhibitors, magnetic particles, and the like.

[1107] Host cells transformed with a polynucleotide sequence of interest may be cultured under conditions suitable for the expression and recovery of the protein from cell culture. The protein produced by a recombinant cell may be secreted or contained intracellularly depending on the sequence and/or the vector used. As will be understood by those of skill in the art, expression vectors containing polynucleotides of the invention may be designed to contain signal sequences which direct secretion of the encoded polypeptide through a prokaryotic or eukaryotic cell membrane. Other recombinant constructions may be used to join sequences encoding a polypeptide of interest to nucleotide sequence encoding a polypeptide domain which will facilitate purification of soluble proteins. Such purification facilitating domains include, but are not limited to, metal chelating peptides such as histidine-tryptophan modules that allow purification on immobilized metals, protein A domains that allow purification on immobilized immunoglobulin, and the domain utilized in the FLAGS extension/affinity purification system (Immunex Corp., Seattle, Wash.). The inclusion of cleavable linker sequences such as those specific for Factor XA or enterokinase (Invitrogen. San Diego, Calif.) between the purification domain and the encoded polypeptide may be used to facilitate purification. One such expression vector provides for expression of a fusion protein containing a polypeptide of interest and a nucleic acid encoding 6 histidine residues preceding a thioredoxin or an enterokinase cleavage site. The histidine residues facilitate purification on IMIAC (immobilized metal ion affinity chromatography) as described in Porath, J. et al. (1992, Prot. Exp. Purif 3:263-281) while the enterokinase cleavage site provides a means for purifying the desired polypeptide from the fusion protein. A discussion of vectors which contain fusion proteins is provided in Kroll, D. J. et al. (1993; DNA Cell Biol. 12:441-453).

[1108] In addition to recombinant production methods, polypeptides of the invention, and fragments thereof, may be produced by direct peptide synthesis using solid-phase techniques (Merrifield J. (1963) J. Am. Chem. Soc. 85:2149-2154). Protein synthesis may be performed using manual techniques or by automation. Automated synthesis may be achieved, for example, using Applied Biosystems 431A Peptide Synthesizer (Perkin Elmer). Alternatively, various fragments may be chemically synthesized separately and combined using chemical methods to produce the full length molecule.

[1109] Antibody Compositions Fragments Thereof and Other Binding Agents

[1110] According to another aspect, the present invention further provides binding agents, such as antibodies and antigen-binding fragments thereof, that exhibit immunological binding to a tumor polypeptide disclosed herein, or to a portion, variant or derivative thereof. An antibody, or antigen-binding fragment thereof, is said to “specifically bind,” “immunogically bind,” and/or is “immunologically reactive” to a polypeptide of the invention if it reacts at a detectable level (within, for example, an ELISA assay) with the polypeptide, and does not react detectably with unrelated polypeptides under similar conditions.

[1111] Immunological binding, as used in this context, generally refers to the non-covalent interactions of the type which occur between an immunoglobulin molecule and an antigen for which the immunoglobulin is specific. The strength, or affinity of immunological binding interactions can be expressed in terms of the dissociation constant (K_{d}) of the interaction, wherein a smaller K_{d} represents a greater affinity. Immunological binding properties of selected polypeptides can be quantified using methods well known in the art. One such method entails measuring the rates of antigen-binding site/antigen complex formation and dissociation, wherein those rates depend on the concentrations of the complex partners, the affinity of the interaction, and on geometric parameters that equally influence the rate in both directions. Thus, both the “on rate constant” (Kₒₙ) and the “off rate constant” (K_{off}) can be determined by calculation of the concentrations and the actual rates of association and dissociation. The ratio of K_{off/K}ₒₙ enables cancellation of all parameters not related to affinity, and is thus equal to the dissociation constant K_{d}. See, generally, Davies et al. (1990) Annual Rev. Biochem. 59:439-473.

[1112] An “antigen-binding site,” or “binding portion” of an antibody refers to the part of the immunoglobulin molecule that participates in antigen binding. The antigen binding site is formed by amino acid residues of the N-terminal variable (“V”) regions of the heavy (“H”) and light (“L”) chains. Three highly divergent stretches within the V regions of the heavy and light chains are referred to as “hypervariable regions” which are interposed between more conserved flanking stretches known as “framework regions,” or “FRs”. Thus the term “FR” refers to amino acid sequences which are naturally found between and adjacent to hypervariable regions in immunoglobulins. In an antibody molecule, the three hypervariable regions of a light chain and the three hypervariable regions of a heavy chain are disposed relative to each other in three dimensional space to form an antigen-binding surface. The antigen-binding surface is complementary to the three-dimensional surface of a bound antigen, and the three hypervariable regions of each of the heavy and light chains are referred to as “complementarity-determining regions,” or “CDRs.”

[1113] Binding agents may be further capable of differentiating between patients with and without a cancer, such as lung cancer, using the representative assays provided herein. For example, antibodies or other binding agents that bind to a tumor protein will preferably generate a signal indicating the presence of a cancer in at least about 20% of patients with the disease, more preferably at least about 30% of patients. Alternatively, or in addition, the antibody will generate a negative signal indicating the absence of the disease in at least about 90% of individuals without the cancer. To determine whether a binding agent satisfies this requirement, biological samples (e.g., blood, sera, sputum, urine and/or tumor biopsies) from patients with and without a cancer (as determined using standard clinical tests) may be assayed as described herein for the presence of polypeptides that bind to the binding agent. Preferably, a statistically significant number of samples with and without the disease will be assayed. Each binding agent should satisfy the above criteria; however, those of ordinary skill in the art will recognize that binding agents may be used in combination to improve sensitivity.

[1114] Any agent that satisfies the above requirements may be a binding agent. For example, a binding agent may be a ribosome, with or without a peptide component, an RNA molecule or a polypeptide. In a preferred embodiment, a binding agent is an antibody or an antigen-binding fragment thereof. Antibodies may be prepared by any of a variety of techniques known to those of ordinary skill in the art. See, e.g., Harlow and Lane, Antibodies: A Laboratory Manual, Cold Spring Harbor Laboratory, 1988. In general, antibodies can be produced by cell culture techniques, including the generation of monoclonal antibodies as described herein, or via transfection of antibody genes into suitable bacterial or mammalian cell hosts, in order to allow for the production of recombinant antibodies. In one technique, an immunogen comprising the polypeptide is initially injected into any of a wide variety of mammals (e.g., mice, rats, rabbits, sheep or goats). In this step, the polypeptides of this invention may serve as the immunogen without modification. Alternatively, particularly for relatively short polypeptides, a superior immune response may be elicited if the polypeptide is joined to a carrier protein, such as bovine serum albumin or keyhole limpet hemocyanin. The immunogen is injected into the animal host, preferably according to a predetermined schedule incorporating one or more booster immunizations, and the animals are bled periodically. Polyclonal antibodies specific for the polypeptide may then be purified from such antisera by, for example, affinity chromatography using the polypeptide coupled to a suitable solid support.

[1115] Monoclonal antibodies specific for an antigenic polypeptide of interest may be prepared, for example, using the technique of Kohler and Milstein, Eur. J. Immunol. 6:511-519, 1976, and improvements thereto. Briefly, these methods involve the preparation of immortal cell lines capable of producing antibodies having the desired specificity (i.e., reactivity with the polypeptide of interest). Such cell lines may be produced, for example, from spleen cells obtained from an animal immunized as described above. The spleen cells are then immortalized by, for example, fusion with a myeloma cell fusion partner, preferably one that is syngeneic with the immunized animal. A variety of fusion techniques may be employed. For example, the spleen cells and myeloma cells may be combined with a nonionic detergent for a few minutes and then plated at low density on a selective medium that supports the growth of hybrid cells, but not myeloma cells. A preferred selection technique uses HAT (hypoxanthine, aminopterin, thymidine) selection. After a sufficient time, usually about 1 to 2 weeks, colonies of hybrids are observed. Single colonies are selected and their culture supernatants tested for binding activity against the polypeptide. Hybridomas having high reactivity and specificity are preferred.

[1116] Monoclonal antibodies may be isolated from the supernatants of growing hybridoma colonies. In addition, various techniques may be employed to enhance the yield, such as injection of the hybridoma cell line into the peritoneal cavity of a suitable vertebrate host, such as a mouse. Monoclonal antibodies may then be harvested from the ascites fluid or the blood. Contaminants may be removed from the antibodies by conventional techniques, such as chromatography, gel filtration, precipitation, and extraction. The polypeptides of this invention may be used in the purification process in, for example, an affinity chromatography step.

[1117] A number of therapeutically useful molecules are known in the art which comprise antigen-binding sites that are capable of exhibiting immunological binding properties of an antibody molecule. The proteolytic enzyme papain preferentially cleaves IgG molecules to yield several fragments, two of which (the “F(ab)” fragments) each comprise a covalent heterodimer that includes an intact antigen-binding site. The enzyme pepsin is able to cleave IgG molecules to provide several fragments, including the “F(ab′)₂ ” fragment which comprises both antigen-binding sites. An “Fv” fragment can be produced by preferential proteolytic cleavage of an IgM, and on rare occasions IgG or IgA immunoglobulin molecule. Fv fragments are, however, more commonly derived using recombinant techniques known in the art. The Fv fragment includes a non-covalent V_{H}::V_{L} heterodimer including an antigen-binding site which retains much of the antigen recognition and binding capabilities of the native antibody molecule. Inbar et al. (1972) Proc. Nat. Acad. Sci. USA 69:2659-2662;Hochman et al. (1976) Biochem 15:2706-2710; and Ehrlich et al. (1980) Biochem 19:4091-4096.

[1118] A single chain Fv (“sFv”) polypeptide is a covalently linked V_{H}::V_{L} heterodimer which is expressed from a gene fusion including V_{H}- and V_{L}-encoding genes linked by a peptide-encoding linker. Huston et al. (1988) Proc. Nat. Acad. Sci. USA 85(16):5879-5883. A number of methods have been described to discern chemical structures for converting the naturally aggregated—but chemically separated—light and heavy polypeptide chains from an antibody V region into an sFv molecule which will fold into a three dimensional structure substantially similar to the structure of an antigen-binding site. See, e.g., U.S. Pat. Nos. 5,091,513 and 5,132,405, to Huston et al.; and U.S. Pat. No. 4,946,778, to Ladner et al.

[1119] Each of the above-described molecules includes a heavy chain and a light chain CDR set, respectively interposed between a heavy chain and a light chain FR set which provide support to the CDRS and define the spatial relationship of the CDRs relative to each other. As used herein, the term “CDR set” refers to the three hypervariable regions of a heavy or light chain V region. Proceeding from the N-terminus of a heavy or light chain, these regions are denoted as “CDR1,” “CDR2,” and “CDR3” respectively. An antigen-binding site, therefore, includes six CDRs, comprising the CDR set from each of a heavy and a light chain V region. A polypeptide comprising a single CDR, (e.g., a CDR1, CDR2 or CDR3) is referred to herein as a “molecular recognition unit.” Crystallographic analysis of a number of antigen-antibody complexes has demonstrated that the amino acid residues of CDRs form extensive contact with bound antigen, wherein the most extensive antigen contact is with the heavy chain CDR3. Thus, the molecular recognition units are primarily responsible for the specificity of an antigen-binding site.

[1120] As used herein, the term “FR set” refers to the four flanking amino acid sequences which frame the CDRs of a CDR set of a heavy or light chain V region. Some FR residues may contact bound antigen; however, FRs are primarily responsible for folding the V region into the antigen-binding site, particularly the FR residues directly adjacent to the CDRS. Within FRs, certain amino residues and certain structural features are very highly conserved. In this regard, all V region sequences contain an internal disulfide loop of around 90 amino acid residues. When the V regions fold into a binding-site, the CDRs are displayed as projecting loop motifs which form an antigen-binding surface. It is generally recognized that there are conserved structural regions of FRs which influence the folded shape of the CDR loops into certain “canonical” structures—regardless of the precise CDR amino acid sequence. Further, certain FR residues are known to participate in non-covalent interdomain contacts which stabilize the interaction of the antibody heavy and light chains.

[1121] A number of “humanized” antibody molecules comprising an antigen-binding site derived from a non-human immunoglobulin have been described, including chimeric antibodies having rodent V regions and their associated CDRs fused to human constant domains (Winter et al. (1991) Nature 349:293-299; Lobuglio et al. (1989) Proc.

[1122] Nat. Acad. Sci. USA 86:4220-4224; Shaw et al. (1987) J. Immunol. 138:4534-4538; and

[1123] Brown et al. (1987) Cancer Res. 47:3577-3583), rodent CDRs grafted into a human supporting FR prior to fusion with an appropriate human antibody constant domain (Riechmann et al. (1988) Nature 332:323-327; Verhoeyen et al. (1988) Science 239:1534-1536; and Jones et al. (1986) Nature 321:522-525), and rodent CDRs supported by recombinantly veneered rodent FRs (European Patent Publication No. 519,596, published Dec. 23, 1992). These “humanized” molecules are designed to minimize unwanted immunological response toward rodent antihuman antibody molecules which limits the duration and effectiveness of therapeutic applications of those moieties in human recipients.

[1124] As used herein, the terms “veneered FRs” and “recombinantly veneered FRs” refer to the selective replacement of FR residues from, e.g., a rodent heavy or light chain V region, with human FR residues in order to provide a xenogeneic molecule comprising an antigen-binding site which retains substantially all of the native FR polypeptide folding structure. Veneering techniques are based on the understanding that the ligand binding characteristics of an antigen-binding site are determined primarily by the structure and relative disposition of the heavy and light chain CDR sets within the antigen-binding surface. Davies et al. (1990) Ann. Rev. Biochem. 59:439-473. Thus, antigen binding specificity can be preserved in a humanized antibody only wherein the CDR structures, their interaction with each other, and their interaction with the rest of the V region domains are carefully maintained. By using veneering techniques, exterior (e.g., solvent-accessible) FR residues which are readily encountered by the immune system are selectively replaced with human residues to provide a hybrid molecule that comprises either a weakly immunogenic, or substantially non-immunogenic veneered surface.

[1125] The process of veneering makes use of the available sequence data for human antibody variable domains compiled by Kabat et al., in Sequences of Proteins of Immunological Interest, 4th ed., (U.S. Dept. of Health and Human Services, U.S. Government Printing Office, 1987), updates to the Kabat database, and other accessible U.S. and foreign databases (both nucleic acid and protein). Solvent accessibilities of V region amino acids can be deduced from the known three-dimensional structure for human and murine antibody fragments. There are two general steps in veneering a murine antigen-binding site. Initially, the FRs of the variable domains of an antibody molecule of interest are compared with corresponding FR sequences of human variable domains obtained from the above-identified sources. The most homologous human V regions are then compared residue by residue to corresponding murine amino acids. The residues in the murine FR which differ from the human counterpart are replaced by the residues present in the human moiety using recombinant techniques well known in the art. Residue switching is only carried out with moieties which are at least partially exposed (solvent accessible), and care is exercised in the replacement of amino acid residues which may have a significant effect on the tertiary structure of V region domains, such as proline, glycine and charged amino acids.

[1126] In this manner, the resultant “veneered” murine antigen-binding sites are thus designed to retain the murine CDR residues, the residues substantially adjacent to the CDRs, the residues identified as buried or mostly buried (solvent inaccessible), the residues believed to participate in non-covalent (e.g., electrostatic and hydrophobic) contacts between heavy and light chain domains, and the residues from conserved structural regions of the FRs which are believed to influence the “canonical” tertiary structures of the CDR loops. These design criteria are then used to prepare recombinant nucleotide sequences which combine the CDRs of both the heavy and light chain of a murine antigen-binding site into human-appearing FRs that can be used to transfect mammalian cells for the expression of recombinant human antibodies which exhibit the antigen specificity of the murine antibody molecule.

[1127] In another embodiment of the invention, monoclonal antibodies of the present invention may be coupled to one or more therapeutic agents. Suitable agents in this regard include radionuclides, differentiation inducers, drugs, toxins, and derivatives thereof Preferred radionuclides include ⁹⁰Y, ¹²³I, ¹²⁵I, ¹³¹I, ¹⁸⁶Re, ¹⁸⁸Re, ²¹¹At, and ²¹²Bi. Preferred drugs include methotrexate, and pyrimidine and purine analogs. Preferred differentiation inducers include phorbol esters and butyric acid. Preferred toxins include ricin, abrin, diptheria toxin, cholera toxin, gelonin, Pseudomonas exotoxin, Shigella toxin, and pokeweed antiviral protein.

[1128] A therapeutic agent may be coupled (e.g., covalently bonded) to a suitable monoclonal antibody either directly or indirectly (e.g., via a linker group). A direct reaction between an agent and an antibody is possible when each possesses a substituent capable of reacting with the other. For example, a nucleophilic group, such as an amino or sulfhydryl group, on one may be capable of reacting with a carbonyl-containing group, such as an anhydride or an acid halide, or with an alkyl group containing a good leaving group (e.g., a halide) on the other.

[1129] Alternatively, it may be desirable to couple a therapeutic agent and an antibody via a linker group. A linker group can function as a spacer to distance an antibody from an agent in order to avoid interference with binding capabilities. A linker group can also serve to increase the chemical reactivity of a substituent on an agent or an antibody, and thus increase the coupling efficiency. An increase in chemical reactivity may also facilitate the use of agents, or functional groups on agents, which otherwise would not be possible.

[1130] It will be evident to those skilled in the art that a variety of bifunctional or polyfunctional reagents, both homo- and hetero-functional (such as those described in the catalog of the Pierce Chemical Co., Rockford, Ill.), may be employed as the linker group. Coupling may be effected, for example, through amino groups, carboxyl groups, sulfhydryl groups or oxidized carbohydrate residues. There are numerous references describing such methodology, e.g., U.S. Pat. No. 4,671,958, to Rodwell et al.

[1131] Where a therapeutic agent is more potent when free from the antibody portion of the immunoconjugates of the present invention, it may be desirable to use a linker group which is cleavable during or upon internalization into a cell. A number of different cleavable linker groups have been described. The mechanisms for the intracellular release of an agent from these linker groups include cleavage by reduction of a disulfide bond (e.g., U.S. Pat. No. 4,489,710, to Spitler), by irradiation of a photolabile bond (e.g., U.S. Pat. No. 4,625,014, to Senter et al.), by hydrolysis of derivatized amino acid side chains (e.g., U.S. Pat. No. 4,638,045, to Kohn et al.), by serum complement-mediated hydrolysis (e.g., U.S. Pat. No. 4,671,958, to Rodwell et al.), and acid-catalyzed hydrolysis (e.g., U.S. Pat. No. 4,569,789, to Blattler et al.).

[1132] It may be desirable to couple more than one agent to an antibody. In one embodiment, multiple molecules of an agent are coupled to one antibody molecule. In another embodiment, more than one type of agent may be coupled to one antibody. Regardless of the particular embodiment, immunoconjugates with more than one agent may be prepared in a variety of ways. For example, more than one agent may be coupled directly to an antibody molecule, or linkers that provide multiple sites for attachment can be used. Alternatively, a carrier can be used.

[1133] A carrier may bear the agents in a variety of ways, including covalent bonding either directly or via a linker group. Suitable carriers include proteins such as albumins (e.g., U.S. Pat. No. 4,507,234, to Kato et al.), peptides and polysaccharides such as aminodextran (e.g., U.S. Pat. No. 4,699,784, to Shih et al.). A carrier may also bear an agent by noncovalent bonding or by encapsulation, such as within a liposome vesicle (e.g., U.S. Pat. Nos. 4,429,008 and 4,873,088). Carriers specific for radionuclide agents include radiohalogenated small molecules and chelating compounds. For example, U.S. Pat. No. 4,735,792 discloses representative radiohalogenated small molecules and their synthesis. A radionuclide chelate may be formed from chelating compounds that include those containing nitrogen and sulfur atoms as the donor atoms for binding the metal, or metal oxide, radionuclide. For example, U.S. Pat. No. 4,673,562, to Davison et al. discloses representative chelating compounds and their synthesis.

[1134] T Cell Compositions

[1135] The present invention, in another aspect, provides T cells specific for a tumor polypeptide disclosed herein, or for a variant or derivative thereof. Such cells may generally be prepared in vitro or ex vivo, using standard procedures. For example, T cells may be isolated from bone marrow, peripheral blood, or a fraction of bone marrow or peripheral blood of a patient, using a commercially available cell separation system, such as the Isolex™ System, available from Nexell Therapeutics, Inc. (Irvine, Calif.; see also U.S. Pat. No. 5,240,856; 5,215,926; WO 89/06280; WO 91/16116 and WO 92/07243). Alternatively, T cells may be derived from related or unrelated humans, non-human mammals, cell lines or cultures.

[1136] T cells may be stimulated with a polypeptide, polynucleotide encoding a polypeptide and/or an antigen presenting cell (APC) that expresses such a polypeptide. Such stimulation is performed under conditions and for a time sufficient to permit the generation of T cells that are specific for the polypeptide of interest. Preferably, a tumor polypeptide or polynucleotide of the invention is present within a delivery vehicle, such as a microsphere, to facilitate the generation of specific T cells.

[1137] T cells are considered to be specific for a polypeptide of the present invention if the T cells specifically proliferate, secrete cytokines or kill target cells coated with the polypeptide or expressing a gene encoding the polypeptide. T cell specificity may be evaluated using any of a variety of standard techniques. For example, within a chromium release assay or proliferation assay, a stimulation index of more than two fold increase in lysis and/or proliferation, compared to negative controls, indicates T cell specificity. Such assays may be performed, for example, as described in Chen et al., Cancer Res. 54:1065-1070, 1994. Alternatively, detection of the proliferation of T cells may be accomplished by a variety of known techniques. For example, T cell proliferation can be detected by measuring an increased rate of DNA synthesis (e.g., by pulse-labeling cultures of T cells with tritiated thymidine and measuring the amount of tritiated thymidine incorporated into DNA). Contact with a tumor polypeptide (100 ng/ml-100 μg/ml, preferably 200 ng/ml-25 μg/ml) for 3-7 days will typically result in at least a two fold increase in proliferation of the T cells. Contact as described above for 2-3 hours should result in activation of the T cells, as measured using standard cytokine assays in which a two fold increase in the level of cytokine release (e.g., TNF or IFN-γ) is indicative of T cell activation (see Coligan et al., Current Protocols in Immunology, vol. 1, Wiley Interscience (Greene 1998)). T cells that have been activated in response to a tumor polypeptide, polynucleotide or polypeptide-expressing APC may be CD4⁺ and/or CD8⁺. Tumor polypeptide-specific T cells may be expanded using standard techniques. Within preferred embodiments, the T cells are derived from a patient, a related donor or an unrelated donor, and are administered to the patient following stimulation and expansion.

[1138] For therapeutic purposes, CD4⁺ or CD8⁺ T cells that proliferate in response to a tumor polypeptide, polynucleotide or APC can be expanded in number either in vitro or in vivo. Proliferation of such T cells in vitro may be accomplished in a variety of ways. For example, the T cells can be re-exposed to a tumor polypeptide, or a short peptide corresponding to an immunogenic portion of such a polypeptide, with or without the addition of T cell growth factors, such as interleukin-2, and/or stimulator cells that synthesize a tumor polypeptide. Alternatively, one or more T cells that proliferate in the presence of the tumor polypeptide can be expanded in number by cloning. Methods for cloning cells are well known in the art, and include limiting dilution.

[1139] Pharmaceutical Compositions

[1140] In additional embodiments, the present invention concerns formulation of one or more of the polynucleotide, polypeptide, T-cell and/or antibody compositions disclosed herein in pharmaceutically-acceptable carriers for administration to a cell or an animal, either alone, or in combination with one or more other modalities of therapy.

[1141] It will be understood that, if desired, a composition as disclosed herein may be administered in combination with other agents as well, such as, e.g., other proteins or polypeptides or various pharmaceutically-active agents. In fact, there is virtually no limit to other components that may also be included, given that the additional agents do not cause a significant adverse effect upon contact with the target cells or host tissues. The compositions may thus be delivered along with various other agents as required in the particular instance. Such compositions may be purified from host cells or other biological sources, or alternatively may be chemically synthesized as described herein. Likewise, such compositions may further comprise substituted or derivatized RNA or DNA compositions.

[1142] Therefore, in another aspect of the present invention, pharmaceutical compositions are provided comprising one or more of the polynucleotide, polypeptide, antibody, and/or T-cell compositions described herein in combination with a physiologically acceptable carrier. In certain preferred embodiments, the pharmaceutical compositions of the invention comprise immunogenic polynucleotide and/or polypeptide compositions of the invention for use in prophylactic and theraputic vaccine applications. Vaccine preparation is generally described in, for example, M. F. Powell and M. J. Newman, eds., “Vaccine Design (the subunit and adjuvant approach),” Plenum Press (NY, 1995). Generally, such compositions will comprise one or more polynucleotide and/or polypeptide compositions of the present invention in combination with one or more immunostimulants.

[1143] It will be apparent that any of the pharmaceutical compositions described herein can contain pharmaceutically acceptable salts of the polynucleotides and polypeptides of the invention. Such salts can be prepared, for example, from pharmaceutically acceptable non-toxic bases, including organic bases (e.g., salts of primary, secondary and tertiary amines and basic amino acids) and inorganic bases (e.g., sodium, potassium, lithium, ammonium, calcium and magnesium salts).

[1144] In another embodiment, illustrative immunogenic compositions, e.g., vaccine compositions, of the present invention comprise DNA encoding one or more of the polypeptides as described above, such that the polypeptide is generated in situ. As noted above, the polynucleotide may be administered within any of a variety of delivery systems known to those of ordinary skill in the art. Indeed, numerous gene delivery techniques are well known in the art, such as those described by Rolland, Crit. Rev. Therap. Drug Carrier Systems 15:143-198, 1998, and references cited therein. Appropriate polynucleotide expression systems will, of course, contain the necessary regulatory DNA regulatory sequences for expression in a patient (such as a suitable promoter and terminating signal). Alternatively, bacterial delivery systems may involve the administration of a bacterium (such as Bacillus-Calmette-Guerrin) that expresses an immunogenic portion of the polypeptide on its cell surface or secretes such an epitope.

[1145] Therefore, in certain embodiments, polynucleotides encoding immunogenic polypeptides described herein are introduced into suitable mammalian host cells for expression using any of a number of known viral-based systems. In one illustrative embodiment, retroviruses provide a convenient and effective platform for gene delivery systems. A selected nucleotide sequence encoding a polypeptide of the present invention can be inserted into a vector and packaged in retroviral particles using techniques known in the art. The recombinant virus can then be isolated and delivered to a subject. A number of illustrative retroviral systems have been described (e.g., U.S. Pat. No. 5,219,740; Miller and Rosman (1989) BioTechniques 7:980-990; Miller, A. D. (1990) Human Gene Therapy 1:5-14; Scarpa et al. (1991) Virology 180:849-852; Burns et al. (1993) Proc. Natl. Acad. Sci. USA 90:8033-8037; and Boris-Lawrie and Temin (1993) Cur. Opin. Genet. Develop. 3:102-109.

[1146] In addition, a number of illustrative adenovirus-based systems have also been described. Unlike retroviruses which integrate into the host genome, adenoviruses persist extrachromosomally thus minimizing the risks associated with insertional mutagenesis (Haj-Ahmad and Graham (1986) J. Virol. 57:267-274; Bett et al. (1993) J. Virol. 67:5911-5921; Mittereder et al. (1994) Human Gene Therapy 5:717-729; Seth et al. (1994) J. Virol. 68:933-940; Barr et al. (1994) Gene Therapy 1:51-58; Berkner, K. L. (1988) BioTechniques 6:616-629; and Rich et al. (1993) Human Gene Therapy 4:461-476).

[1147] Various adeno-associated virus (AAV) vector systems have also been developed for polynucleotide delivery. AAV vectors can be readily constructed using techniques well known in the art. See, e.g., U.S. Pat. Nos. 5,173,414 and 5,139,941; International Publication Nos. WO 92/01070 and WO 93/03769; Lebkowski et al. (1988) Molec. Cell. Biol. 8:3988-3996; Vincent et al. (1990) Vaccines 90 (Cold Spring Harbor Laboratory Press); Carter, B. J. (1992) Current Opinion in Biotechnology 3:533-539; Muzyczka, N. (1992) Current Topics in Microbiol. and Immunol. 158:97-129; Kotin, R. M. (1994) Human Gene Therapy 5:793-801; Shelling and Smith (1994) Gene Therapy 1:165-169; and Zhou et al. (1994) J. Exp. Med. 179:1867-1875.

[1148] Additional viral vectors useful for delivering the polynucleotides encoding polypeptides of the present invention by gene transfer include those derived from the pox family of viruses, such as vaccinia virus and avian poxyirus. By way of example, vaccinia virus recombinants expressing the novel molecules can be constructed as follows. The DNA encoding a polypeptide is first inserted into an appropriate vector so that it is adjacent to a vaccinia promoter and flanking vaccinia DNA sequences, such as the sequence encoding thymidine kinase (TK). This vector is then used to transfect cells which are simultaneously infected with vaccinia. Homologous recombination serves to insert the vaccinia promoter plus the gene encoding the polypeptide of interest into the viral genome. The resulting TK.sup.(-) recombinant can be selected by culturing the cells in the presence of 5-bromodeoxyuridine and picking viral plaques resistant thereto.

[1149] A vaccinia-based infection/transfection system can be conveniently used to provide for inducible, transient expression or coexpression of one or more polypeptides described herein in host cells of an organism. In this particular system, cells are first infected in vitro with a vaccinia virus recombinant that encodes the bacteriophage T7 RNA polymerase. This polymerase displays exquisite specificity in that it only transcribes templates bearing T7 promoters. Following infection, cells are transfected with the polynucleotide or polynucleotides of interest, driven by a T7 promoter. The polymerase expressed in the cytoplasm from the vaccinia virus recombinant transcribes the transfected DNA into RNA which is then translated into polypeptide by the host translational machinery. The method provides for high level, transient, cytoplasmic production of large quantities of RNA and its translation products. See, e.g., Elroy-Stein and Moss, Proc. Natl. Acad. Sci. USA (1990) 87:6743-6747; Fuerst et al. Proc. Natl. Acad. Sci. USA (1986) 83:8122-8126.

[1150] Alternatively, avipoxyiruses, such as the fowlpox and canarypox viruses, can also be used to deliver the coding sequences of interest. Recombinant avipox viruses, expressing immunogens from mammalian pathogens, are known to confer protective immunity when administered to non-avian species. The use of an Avipox vector is particularly desirable in human and other mammalian species since members of the Avipox genus can only productively replicate in susceptible avian species and therefore are not infective in mammalian cells. Methods for producing recombinant Avipoxyiruses are known in the art and employ genetic recombination, as described above with respect to the production of vaccinia viruses. See, e.g., WO 91/12882; WO 89/03429; and WO 92/03545.

[1151] Any of a number of alphavirus vectors can also be used for delivery of polynucleotide compositions of the present invention, such as those vectors described in U.S. Pat. Nos. 5,843,723; 6,015,686; 6,008,035 and 6,015,694. Certain vectors based on Venezuelan Equine Encephalitis (VEE) can also be used, illustrative examples of which can be found in U.S. Pat. Nos. 5,505,947 and 5,643,576.

[1152] Moreover, molecular conjugate vectors, such as the adenovirus chimeric vectors described in Michael et al. J. Biol. Chem. (1993) 268:6866-6869 and Wagner et al. Proc. Natl. Acad. Sci. USA (1992) 89:6099-6103, can also be used for gene delivery under the invention.

[1153] Additional illustrative information on these and other known viral-based delivery systems can be found, for example, in Fisher-Hoch et al., Proc. Natl. Acad. Sci. USA 86:317-321, 1989; Flexner et al., Ann. N.Y. Acad. Sci. 569:86-103, 1989; Flexner et al., Vaccine 8:17-21, 1990; U.S. Pat. Nos. 4,603,112, 4,769,330, and 5,017,487; WO 89/01973; U.S. Pat. No. 4,777,127; GB 2,200,651; EP 0,345,242; WO 91/02805; Berkner, Biotechniques 6:616-627, 1988; Rosenfeld et al., Science 252:431-434, 1991; Kolls et al., Proc. Natl. Acad. Sci. USA 91:215-219, 1994; Kass-Eisler et al., Proc. Natl. Acad. Sci. USA 90:11498-11502, 1993; Guzman et al., Circulation 88:2838-2848, 1993; and Guzman et al., Cir. Res. 73:1202-1207, 1993.

[1154] In certain embodiments, a polynucleotide may be integrated into the genome of a target cell. This integration may be in the specific location and orientation via homologous recombination (gene replacement) or it may be integrated in a random, non-specific location (gene augmentation). In yet further embodiments, the polynucleotide may be stably maintained in the cell as a separate, episomal segment of DNA. Such polynucleotide segments or “episomes” encode sequences sufficient to permit maintenance and replication independent of or in synchronization with the host cell cycle. The manner in which the expression construct is delivered to a cell and where in the cell the polynucleotide remains is dependent on the type of expression construct employed.

[1155] In another embodiment of the invention, a polynucleotide is administered/delivered as “naked” DNA, for example as described in Ulmer et al., Science 259:1745-1749, 1993 and reviewed by Cohen, Science 259:1691-1692, 1993. The uptake of naked DNA may be increased by coating the DNA onto biodegradable beads, which are efficiently transported into the cells.

[1156] In still another embodiment, a composition of the present invention can be delivered via a particle bombardment approach, many of which have been described. In one illustrative example, gas-driven particle acceleration can be achieved with devices such as those manufactured by Powderject Pharmaceuticals PLC (Oxford, UK) and Powderject Vaccines Inc. (Madison, Wis.), some examples of which are described in U.S. Pat. Nos. 5,846,796; 6,010,478; 5,865,796; 5,584,807; and EP Patent No. 0500 799. This approach offers a needle-free delivery approach wherein a dry powder formulation of microscopic particles, such as polynucleotide or polypeptide particles, are accelerated to high speed within a helium gas jet generated by a hand held device, propelling the particles into a target tissue of interest.

[1157] In a related embodiment, other devices and methods that may be useful for gas-driven needle-less injection of compositions of the present invention include those provided by Bioject, Inc. (Portland, Oreg.), some examples of which are described in U.S. Pat. Nos. 4,790,824; 5,064,413; 5,312,335; 5,383,851; 5,399,163; 5,520,639 and 5,993,412.

[1158] According to another embodiment, the pharmaceutical compositions described herein will comprise one or more immunostimulants in addition to the immunogenic polynucleotide, polypeptide, antibody, T-cell and/or APC compositions of this invention. An immunostimulant refers to essentially any substance that enhances or potentiates an immune response (antibody and/or cell-mediated) to an exogenous antigen. One preferred type of immunostimulant comprises an adjuvant. Many adjuvants contain a substance designed to protect the antigen from rapid catabolism, such as aluminum hydroxide or mineral oil, and a stimulator of immune responses, such as lipid A, Bortadella pertussis or Mycobacterium tuberculosis derived proteins. Certain adjuvants are commercially available as, for example, Freund's Incomplete Adjuvant and Complete Adjuvant (Difco Laboratories, Detroit, Mich.); Merck Adjuvant 65 (Merck and Company, Inc., Rahway, N.J.); AS-2 (SmithKline Beecham, Philadelphia, Pa.); aluminum salts such as aluminum hydroxide gel (alum) or aluminum phosphate; salts of calcium, iron or zinc; an insoluble suspension of acylated tyrosine; acylated sugars; cationically or anionically derivatized polysaccharides; polyphosphazenes; biodegradable microspheres; monophosphoryl lipid A and quil A. Cytokines, such as GM-CSF, interleukin-2, -7, -12, and other like growth factors, may also be used as adjuvants.

[1159] Within certain embodiments of the invention, the adjuvant composition is preferably one that induces an immune response predominantly of the Th1 type. High levels of Th1-type cytokines (e.g, IFN-γ, TNFα, IL-2 and IL-12) tend to favor the induction of cell mediated immune responses to an administered antigen. In contrast, high levels of Th2-type cytokines (e.g., IL-4, IL-5, IL-6 and IL-10) tend to favor the induction of humoral immune responses. Following application of a vaccine as provided herein, a patient will support an immune response that includes Th1- and Th2-type responses. Within a preferred embodiment, in which a response is predominantly Th1-type, the level of Th1-type cytokines will increase to a greater extent than the level of Th2-type cytokines. The levels of these cytokines may be readily assessed using standard assays. For a review of the families of cytokines, see Mosmann and Coffman, Ann. Rev. Immunol. 7:145-173, 1989.

[1160] Certain preferred adjuvants for eliciting a predominantly Th1-type response include, for example, a combination of monophosphoryl lipid A, preferably 3-de-O-acylated monophosphoryl lipid A, together with an aluminum salt. MPLO adjuvants are available from Corixa Corporation (Seattle, Wash.; see, for example, U.S. Pat. Nos. 4,436,727; 4,877,611; 4,866,034 and 4,912,094). CpG-containing oligonucleotides (in which the CpG dinucleotide is unmethylated) also induce a predominantly Th1 response. Such oligonucleotides are well known and are described, for example, in WO 96/02555, WO 99/33488 and U.S. Pat. Nos. 6,008,200 and 5,856,462. Immunostimulatory DNA sequences are also described, for example, by Sato et al., Science 273:352, 1996. Another preferred adjuvant comprises a saponin, such as Quil A, or derivatives thereof, including QS21 and QS7 (Aquila Biopharmaceuticals Inc., Framingham, Mass.); Escin; Digitonin; or Gypsophila or Chenopodium quinoa saponins. Other preferred formulations include more than one saponin in the adjuvant combinations of the present invention, for example combinations of at least two of the following group comprising QS21, QS7, Quil A, β-escin, or digitonin.

[1161] Alternatively the saponin formulations may be combined with vaccine vehicles composed of chitosan or other polycationic polymers, polylactide and polylactide-co-glycolide particles, poly-N-acetyl glucosamine-based polymer matrix, particles composed of polysaccharides or chemically modified polysaccharides, liposomes and lipid-based particles, particles composed of glycerol monoesters, etc. The saponins may also be formulated in the presence of cholesterol to form particulate structures such as liposomes or ISCOMs. Furthermore, the saponins may be formulated together with a polyoxyethylene ether or ester, in either a non-particulate solution or suspension, or in a particulate structure such as a paucilamelar liposome or ISCOM. The saponins may also be formulated with excipients such as Carbopol^{R} to increase viscosity, or may be formulated in a dry powder form with a powder excipient such as lactose.

[1162] In one preferred embodiment, the adjuvant system includes the combination of a monophosphoryl lipid A and a saponin derivative, such as the combination of QS21 and 3D-MPL® adjuvant, as described in WO 94/00153, or a less reactogenic composition where the QS21 is quenched with cholesterol, as described in WO 96/33739. Other preferred formulations comprise an oil-in-water emulsion and tocopherol. Another particularly preferred adjuvant formulation employing QS21, 3D-MPL® adjuvant and tocopherol in an oil-in-water emulsion is described in WO 95/17210.

[1163] Another enhanced adjuvant system involves the combination of a CpG-containing oligonucleotide and a saponin derivative particularly the combination of CpG and QS21 is disclosed in WO 00/09159. Preferably the formulation additionally comprises an oil in water emulsion and tocopherol.

[1164] Additional illustrative adjuvants for use in the pharmaceutical compositions of the invention include Montanide ISA 720 (Seppic, France), SAF (Chiron, Calif., United States), ISCOMS (CSL), MF-59 (Chiron), the SBAS series of adjuvants (e.g., SBAS-2 or SBAS-4, available from SmithKline Beecham, Rixensart, Belgium), Detox (Enhanzyn®) (Corixa, Hamilton, Mont.), RC-529 (Corixa, Hamilton, Mont.) and other aminoalkyl glucosaminide 4-phosphates (AGPs), such as those described in pending U.S. patent application Ser. Nos. 08/853,826 and 09/074,720, the disclosures of which are incorporated herein by reference in their entireties, and polyoxyethylene ether adjuvants such as those described in WO 99/52549A1.

[1165] Other preferred adjuvants include adjuvant molecules of the general formula

HO(CH₂CH₂O)ₙ—A—R, (I)

[1166] wherein, n is 1-50, A is a bond or —C(O)—, R is C₁₋₅₀ alkyl or Phenyl C₁₋₅₀ alkyl.

[1167] One embodiment of the present invention consists of a vaccine formulation comprising a polyoxyethylene ether of general formula (I), wherein n is between 1 and 50, preferably 4-24, most preferably 9; the R component is C₁₋₅₀, preferably C₄-C₂₀ alkyl and most preferably C₁₂ alkyl, and A is a bond. The concentration of the polyoxyethylene ethers should be in the range 0.1-20%, preferably from 0.1 - 10%, and most preferably in the range 0.1-1%. Preferred polyoxyethylene ethers are selected from the following group: polyoxyethylene-9-lauryl ether, polyoxyethylene-9-steoryl ether, polyoxyethylene-8-steoryl ether, polyoxyethylene-4-lauryl ether, polyoxyethylene-35-lauryl ether, and polyoxyethylene-23-lauryl ether. Polyoxyethylene ethers such as polyoxyethylene lauryl ether are described in the Merck index (12th edition: entry 7717). These adjuvant molecules are described in WO 99/52549.

[1168] The polyoxyethylene ether according to the general formula (I) above may, if desired, be combined with another adjuvant. For example, a preferred adjuvant combination is preferably with CpG as described in the pending UK patent application GB 9820956.2.

[1169] According to another embodiment of this invention, an immunogenic composition described herein is delivered to a host via antigen presenting cells (APCs), such as dendritic cells, macrophages, B cells, monocytes and other cells that may be engineered to be efficient APCs. Such cells may, but need not, be genetically modified to increase the capacity for presenting the antigen, to improve activation and/or maintenance of the T cell response, to have anti-tumor effects per se and/or to be immunologically compatible with the receiver (i.e., matched HLA haplotype). APCs may generally be isolated from any of a variety of biological fluids and organs, including tumor and peritumoral tissues, and may be autologous, allogeneic, syngeneic or xenogeneic cells.

[1170] Certain preferred embodiments of the present invention use dendritic cells or progenitors thereof as antigen-presenting cells. Dendritic cells are highly potent APCs (Banchereau and Steinman, Nature 392:245-251, 1998) and have been shown to be effective as a physiological adjuvant for eliciting prophylactic or therapeutic antitumor immunity (see Timmerman and Levy, Ann. Rev. Med. 50:507-529, 1999). In general, dendritic cells may be identified based on their typical shape (stellate in situ, with marked cytoplasmic processes (dendrites) visible in vitro), their ability to take up, process and present antigens with high efficiency and their ability to activate naïve T cell responses. Dendritic cells may, of course, be engineered to express specific cell-surface receptors or ligands that are not commonly found on dendritic cells in vivo or ex vivo, and such modified dendritic cells are contemplated by the present invention. As an alternative to dendritic cells, secreted vesicles antigen-loaded dendritic cells (called exosomes) may be used within a vaccine (see Zitvogel et al., Nature Med. 4:594-600, 1998).

[1171] Dendritic cells and progenitors may be obtained from peripheral blood, bone marrow, tumor-infiltrating cells, peritumoral tissues-infiltrating cells, lymph nodes, spleen, skin, umbilical cord blood or any other suitable tissue or fluid. For example, dendritic cells may be differentiated ex vivo by adding a combination of cytokines such as GM-CSF, IL-4, IL-13 and/or TNFα to cultures of monocytes harvested from peripheral blood. Alternatively, CD34 positive cells harvested from peripheral blood, umbilical cord blood or bone marrow may be differentiated into dendritic cells by adding to the culture medium combinations of GM-CSF, IL-3, TNFα, CD40 ligand, LPS, flt3 ligand and/or other compound(s) that induce differentiation, maturation and proliferation of dendritic cells.

[1172] Dendritic cells are conveniently categorized as “immature” and “mature” cells, which allows a simple way to discriminate between two well characterized phenotypes. However, this nomenclature should not be construed to exclude all possible intermediate stages of differentiation. Immature dendritic cells are characterized as APC with a high capacity for antigen uptake and processing, which correlates with the high expression of Fcγ receptor and mannose receptor. The mature phenotype is typically characterized by a lower expression of these markers, but a high expression of cell surface molecules responsible for T cell activation such as class I and class II MHC, adhesion molecules (e.g., CD54 and CD11) and costimulatory molecules (e.g., CD40, CD80, CD86 and 4-1BB).

[1173] APCs may generally be transfected with a polynucleotide of the invention (or portion or other variant thereof) such that the encoded polypeptide, or an immunogenic portion thereof, is expressed on the cell surface. Such transfection may take place ex vivo, and a pharmaceutical composition comprising such transfected cells may then be used for therapeutic purposes, as described herein. Alternatively, a gene delivery vehicle that targets a dendritic or other antigen presenting cell may be administered to a patient, resulting in transfection that occurs in vivo. In vivo and ex vivo transfection of dendritic cells, for example, may generally be performed using any methods known in the art, such as those described in WO 97/24447, or the gene gun approach described by Mahvi et al., Immunology and cell Biology 75:456-460, 1997. Antigen loading of dendritic cells may be achieved by incubating dendritic cells or progenitor cells with the tumor polypeptide, DNA (naked or within a plasmid vector) or RNA; or with antigen-expressing recombinant bacterium or viruses (e.g., vaccinia, fowlpox, adenovirus or lentivirus vectors). Prior to loading, the polypeptide may be covalently conjugated to an immunological partner that provides T cell help (e.g., a carrier molecule). Alternatively, a dendritic cell may be pulsed with a non-conjugated immunological partner, separately or in the presence of the polypeptide.

[1174] While any suitable carrier known to those of ordinary skill in the art may be employed in the pharmaceutical compositions of this invention, the type of carrier will typically vary depending on the mode of administration. Compositions of the present invention may be formulated for any appropriate manner of administration, including for example, topical, oral, nasal, mucosal, intravenous, intracranial, intraperitoneal, subcutaneous and intramuscular administration.

[1175] Carriers for use within such pharmaceutical compositions are biocompatible, and may also be biodegradable. In certain embodiments, the formulation preferably provides a relatively constant level of active component release. In other embodiments, however, a more rapid rate of release immediately upon administration may be desired. The formulation of such compositions is well within the level of ordinary skill in the art using known techniques. Illustrative carriers useful in this regard include microparticles of poly(lactide-co-glycolide), polyacrylate, latex, starch, cellulose, dextran and the like. Other illustrative delayed-release carriers include supramolecular biovectors, which comprise a non-liquid hydrophilic core (e.g., a cross-linked polysaccharide or oligosaccharide) and, optionally, an external layer comprising an amphiphilic compound, such as a phospholipid (see e.g., U.S. Pat. No. 5,151,254 and PCT applications WO 94/20078, WO/94/23701 and WO 96/06638). The amount of active compound contained within a sustained release formulation depends upon the site of implantation, the rate and expected duration of release and the nature of the condition to be treated or prevented.

[1176] In another illustrative embodiment, biodegradable microspheres (e.g., polylactate polyglycolate) are employed as carriers for the compositions of this invention. Suitable biodegradable microspheres are disclosed, for example, in U.S. Pat. Nos. 4,897,268; 5,075,109; 5,928,647; 5,811,128; 5,820,883; 5,853,763; 5,814,344, 5,407,609 and 5,942,252. Modified hepatitis B core protein carrier systems. such as described in WO/99 40934, and references cited therein, will also be usefuil for many applications. Another illustrative carrier/delivery system employs a carrier comprising particulate-protein complexes, such as those described in U.S. Pat. No. 5,928,647, which are capable of inducing a class I-restricted cytotoxic T lymphocyte responses in a host.

[1177] The pharmaceutical compositions of the invention will often further comprise one or more buffers (e.g., neutral buffered saline or phosphate buffered saline), carbohydrates (e.g., glucose, mannose, sucrose or dextrans), mannitol, proteins, polypeptides or amino acids such as glycine, antioxidants, bacteriostats, chelating agents such as EDTA or glutathione, adjuvants (e.g., aluminum hydroxide), solutes that render the formulation isotonic, hypotonic or weakly hypertonic with the blood of a recipient, suspending agents, thickening agents and/or preservatives. Alternatively, compositions of the present invention may be formulated as a lyophilizate.

[1178] The pharmaceutical compositions described herein may be presented in unit-dose or multi-dose containers, such as sealed ampoules or vials. Such containers are typically sealed in such a way to preserve the sterility and stability of the formulation until use. In general, formulations may be stored as suspensions, solutions or emulsions in oily or aqueous vehicles. Alternatively, a pharmaceutical composition may be stored in a freeze-dried condition requiring only the addition of a sterile liquid carrier immediately prior to use.

[1179] The development of suitable dosing and treatment regimens for using the particular compositions described herein in a variety of treatment regimens, including e.g., oral, parenteral, intravenous, intranasal, and intramuscular administration and formulation, is well known in the art, some of which are briefly discussed below for general purposes of illustration.

[1180] In certain applications, the pharmaceutical compositions disclosed herein may be delivered via oral administration to an animal. As such, these compositions may be formulated with an inert diluent or with an assimilable edible carrier, or they may be enclosed in hard- or soft-shell gelatin capsule, or they may be compressed into tablets, or they may be incorporated directly with the food of the diet.

[1181] The active compounds may even be incorporated with excipients and used in the form of ingestible tablets, buccal tables, troches, capsules, elixirs, suspensions, syrups, wafers, and the like (see, for example, Mathiowitz et al., Nature 1997 Mar 27;386(6623):410-4;Hwang et al., Crit Rev Ther Drug Carrier Syst 1998;15(3):243-84; U. S. Patent 5,641,515; U.S. Pat. No. 5,580,579 and U.S. Pat. No. 5,792,451). Tablets, troches, pills, capsules and the like may also contain any of a variety of additional components, for example, a binder, such as gum tragacanth, acacia, cornstarch, or gelatin; excipients, such as dicalcium phosphate; a disintegrating agent, such as corn starch, potato starch, alginic acid and the like; a lubricant, such as magnesium stearate; and a sweetening agent, such as sucrose, lactose or saccharin may be added or a flavoring agent, such as peppermint, oil of wintergreen, or cherry flavoring. When the dosage unit form is a capsule, it may contain, in addition to materials of the above type, a liquid carrier. Various other materials may be present as coatings or to otherwise modify the physical form of the dosage unit. For instance, tablets, pills, or capsules may be coated with shellac, sugar, or both. Of course, any material used in preparing any dosage unit form should be pharmaceutically pure and substantially non-toxic in the amounts employed. In addition, the active compounds may be incorporated into sustained-release preparation and formulations.

[1182] Typically, these formulations will contain at least about 0.1% of the active compound or more, although the percentage of the active ingredient(s) may, of course, be varied and may conveniently be between about 1 or 2% and about 60% or 70% or more of the weight or volume of the total formulation. Naturally, the amount of active compound(s) in each therapeutically useful composition may be prepared is such a way that a suitable dosage will be obtained in any given unit dose of the compound. Factors such as solubility, bioavailability, biological half-life, route of administration, product shelf life, as well as other pharmacological considerations will be contemplated by one skilled in the art of preparing such pharmaceutical formulations, and as such, a variety of dosages and treatment regimens may be desirable.

[1183] For oral administration the compositions of the present invention may alternatively be incorporated with one or more excipients in the form of a mouthwash, dentifrice, buccal tablet, oral spray, or sublingual orally-administered formulation. Alternatively, the active ingredient may be incorporated into an oral solution such as one containing sodium borate, glycerin and potassium bicarbonate, or dispersed in a dentifrice, or added in a therapeutically-effective amount to a composition that may include water, binders, abrasives, flavoring agents, foaming agents, and humectants. Alternatively the compositions may be fashioned into a tablet or solution form that may be placed under the tongue or otherwise dissolved in the mouth.

[1184] In certain circumstances it will be desirable to deliver the pharmaceutical compositions disclosed herein parenterally, intravenously, intramuscularly, or even intraperitoneally. Such approaches are well known to the skilled artisan, some of which are further described, for example, in U.S. Pat. Nos. 5,543,158; 5,641,515 and 5,399,363. In certain embodiments, solutions of the active compounds as free base or pharmacologically acceptable salts may be prepared in water suitably mixed with a surfactant, such as hydroxypropylcellulose. Dispersions may also be prepared in glycerol, liquid polyethylene glycols, and mixtures thereof and in oils. Under ordinary conditions of storage and use, these preparations generally will contain a preservative to prevent the growth of microorganisms.

[1185] Illustrative pharmaceutical forms suitable for injectable use include sterile aqueous solutions or dispersions and sterile powders for the extemporaneous preparation of sterile injectable solutions or dispersions (for example, see U.S. Pat. No. 5,466,468). In all cases the form must be sterile and must be fluid to the extent that easy syringability exists. It must be stable under the conditions of manufacture and storage and must be preserved against the contaminating action of microorganisms, such as bacteria and fungi. The carrier can be a solvent or dispersion medium containing, for example, water, ethanol, polyol (e.g., glycerol, propylene glycol, and liquid polyethylene glycol, and the like), suitable mixtures thereof, and/or vegetable oils. Proper fluidity may be maintained, for example, by the use of a coating, such as lecithin, by the maintenance of the required particle size in the case of dispersion and/or by the use of surfactants. The prevention of the action of microorganisms can be facilitated by various antibacterial and antifungal agents, for example, parabens, chlorobutanol, phenol, sorbic acid, thimerosal, and the like. In many cases, it will be preferable to include isotonic agents, for example, sugars or sodium chloride. Prolonged absorption of the injectable compositions can be brought about by the use in the compositions of agents delaying absorption, for example, aluminum monostearate and gelatin.

[1186] In one embodiment, for parenteral administration in an aqueous solution, the solution should be suitably buffered if necessary and the liquid diluent first rendered isotonic with sufficient saline or glucose. These particular aqueous solutions are especially suitable for intravenous, intramuscular, subcutaneous and intraperitoneal administration. In this connection, a sterile aqueous medium that can be employed will be known to those of skill in the art in light of the present disclosure. For example, one dosage may be dissolved in 1 ml of isotonic NaCl solution and either added to 1000 ml of hypodermoclysis fluid or injected at the proposed site of infusion, (see for example, “Remington's Pharmaceutical Sciences” 15th Edition, pages 1035-1038 and 1570-1580). Some variation in dosage will necessarily occur depending on the condition of the subject being treated. Moreover, for human administration, preparations will of course preferably meet sterility, pyrogenicity, and the general safety and purity standards as required by FDA Office of Biologics standards.

[1187] In another embodiment of the invention, the compositions disclosed herein may be formulated in a neutral or salt form. Illustrative pharmaceutically-acceptable salts include the acid addition salts (formed with the free amino groups of the protein) and which are formed with inorganic acids such as, for example, hydrochloric or phosphoric acids, or such organic acids as acetic, oxalic, tartaric, mandelic, and the like. Salts formed with the free carboxyl groups can also be derived from inorganic bases such as, for example, sodium, potassium, ammonium, calcium, or ferric hydroxides, and such organic bases as isopropylamine, trimethylamine, histidine, procaine and the like. Upon formulation, solutions will be administered in a manner compatible with the dosage formulation and in such amount as is therapeutically effective.

[1188] The carriers can further comprise any and all solvents, dispersion media, vehicles, coatings, diluents, antibacterial and antifungal agents, isotonic and absorption delaying agents, buffers, carrier solutions, suspensions, colloids, and the like. The use of such media and agents for pharmaceutical active substances is well known in the art. Except insofar as any conventional media or agent is incompatible with the active ingredient, its use in the therapeutic compositions is contemplated. Supplementary active ingredients can also be incorporated into the compositions. The phrase “pharmaceutically-acceptable” refers to molecular entities and compositions that do not produce an allergic or similar untoward reaction when administered to a human.

[1189] In certain embodiments, the pharmaceutical compositions may be delivered by intranasal sprays, inhalation, and/or other aerosol delivery vehicles. Methods for delivering genes, nucleic acids, and peptide compositions directly to the lungs via nasal aerosol sprays has been described, e.g., in U.S. Pat. Nos. 5,756,353 and 5,804,212. Likewise, the delivery of drugs using intranasal microparticle resins (Takenaga et al., J Controlled Release 1998 Mar 2;52(1-2):81-7) and lysophosphatidyl-glycerol compounds (U.S. Pat. No. 5,725,871) are also well-known in the pharmaceutical arts. Likewise, illustrative transmucosal drug delivery in the form of a polytetrafluoroetheylene support matrix is described in U.S. Pat. No. 5,780,045.

[1190] In certain embodiments, liposomes, nanocapsules, microparticles, lipid particles, vesicles, and the like, are used for the introduction of the compositions of the present invention into suitable host cells/organisms. In particular, the compositions of the present invention may be formulated for delivery either encapsulated in a lipid particle, a liposome, a vesicle, a nanosphere, or a nanoparticle or the like. Alternatively, compositions of the present invention can be bound, either covalently or non-covalently, to the surface of such carrier vehicles.

[1191] The formation and use of liposome and liposome-like preparations as potential drug carriers is generally known to those of skill in the art (see for example, Lasic, Trends Biotechnol July 1998;16(7):307-21; Takakura, Nippon Rinsho March 1998;56(3):691-5; Chandran et al., Indian J Exp Biol. August 1997;35(8):801-9; Margalit, Crit Rev Ther Drug Carrier Syst. 1995;12(2-3):233-61; U.S. Pat. Nos. 5,567,434; 5,552,157; 5,565,213; 5,738,868 and 5,795,587, each specifically incorporated herein by reference in its entirety).

[1192] Liposomes have been used successfully with a number of cell types that are normally difficult to transfect by other procedures, including T cell suspensions, primary hepatocyte cultures and PC₁₂ cells (Renneisen et al., J. Biol Chem. Sep. 25, 1990 ;265(27):16337-42; Muller et al., DNA Cell Biol. April 1990;9(3):221-9). In addition, liposomes are free of the DNA length constraints that are typical of viral-based delivery systems. Liposomes have been used effectively to introduce genes, various drugs, radiotherapeutic agents, enzymes, viruses, transcription factors, allosteric effectors and the like, into a variety of cultured cell lines and animals. Furthermore, he use of liposomes does not appear to be associated with autoimmune responses or unacceptable toxicity after systemic delivery.

[1193] In certain embodiments, liposomes are formed from phospholipids that are dispersed in an aqueous medium and spontaneously form multilamellar concentric bilayer vesicles (also termed multilamellar vesicles (MLVs).

[1194] Alternatively, in other embodiments, the invention provides for pharmaceutically-acceptable nanocapsule formulations of the compositions of the present invention. Nanocapsules can generally entrap compounds in a stable and reproducible way (see, for example, Quintanar-Guerrero et al., Drug Dev Ind Pharm. 1998 Dec;24(12):1113-28). To avoid side effects due to intracellular polymeric overloading, such ultrafine particles (sized around 0.1 μm) may be designed using polymers able to be degraded in vivo. Such particles can be made as described, for example, by Couvreur et al., Crit Rev Ther Drug Carrier Syst. 1988;5(1):1-20; zur Muhlen et al., Eur J. Pharm Biopharm. March 1998 ;45(2):149-55; Zambaux et al. J Controlled Release. Jan. 2, 1998;50(1-3):31-40; and U.S. Pat. No. 5,145,684.

[1195] Cancer Therapeutic Methods

[1196] In further aspects of the present invention, the pharmaceutical compositions described herein may be used for the treatment of cancer, particularly for the immunotherapy of lung cancer. Within such methods, the pharmaceutical compositions described herein are administered to a patient, typically a warm-blooded animal, preferably a human. A patient may or may not be afflicted with cancer. Accordingly, the above pharmaceutical compositions may be used to prevent the development of a cancer or to treat a patient afflicted with a cancer. Pharmaceutical compositions and vaccines may be administered either prior to or following surgical removal of primary tumors and/or treatment such as administration of radiotherapy or conventional chemotherapeutic drugs. As discussed above, administration of the pharmaceutical compositions may be by any suitable method, including administration by intravenous, intraperitoneal, intramuscular, subcutaneous, intranasal, intradermal, anal, vaginal, topical and oral routes.

[1197] Within certain embodiments, immunotherapy may be active immunotherapy, in which treatment relies on the in vivo stimulation of the endogenous host immune system to react against tumors with the administration of immune response-modifying agents (such as polypeptides and polynucleotides as provided herein).

[1198] Within other embodiments, immunotherapy may be passive immunotherapy, in which treatment involves the delivery of agents with established tumor-immune reactivity (such as effector cells or antibodies) that can directly or indirectly mediate antitumor effects and does not necessarily depend on an intact host immune system. Examples of effector cells include T cells as discussed above, T lymphocytes (such as CD8⁺ cytotoxic T lymphocytes and CD4⁺ T-helper tumor-infiltrating lymphocytes), killer cells (such as Natural Killer cells and lymphokine-activated killer cells), B cells and antigen-presenting cells (such as dendritic cells and macrophages) expressing a polypeptide provided herein. T cell receptors and antibody receptors specific for the polypeptides recited herein may be cloned, expressed and transferred into other vectors or effector cells for adoptive immunotherapy. The polypeptides provided herein may also be used to generate antibodies or anti-idiotypic antibodies (as described above and in U.S. Pat. No. 4,918,164) for passive immunotherapy.

[1199] Effector cells may generally be obtained in sufficient quantities for adoptive immunotherapy by growth in vitro, as described herein. Culture conditions for expanding single antigen-specific effector cells to several billion in number with retention of antigen recognition in vivo are well known in the art. Such in vitro culture conditions typically use intermittent stimulation with antigen, often in the presence of cytokines (such as IL-2) and non-dividing feeder cells. As noted above, immunoreactive polypeptides as provided herein may be used to rapidly expand antigen-specific T cell cultures in order to generate a sufficient number of cells for immunotherapy. In particular, antigen-presenting cells, such as dendritic, macrophage, monocyte, fibroblast and/or B cells, may be pulsed with immunoreactive polypeptides or transfected with one or more polynucleotides using standard techniques well known in the art. For example, antigen-presenting cells can be transfected with a polynucleotide having a promoter appropriate for increasing expression in a recombinant virus or other expression system. Cultured effector cells for use in therapy must be able to grow and distribute widely, and to survive long term in vivo. Studies have shown that cultured effector cells can be induced to grow in vivo and to survive long term in substantial numbers by repeated stimulation with antigen supplemented with IL-2 (see, for example, Cheever et al., Immunological Reviews 157:177, 1997).

[1200] Alternatively, a vector expressing a polypeptide recited herein may be introduced into antigen presenting cells taken from a patient and clonally propagated ex vivo for transplant back into the same patient. Transfected cells may be reintroduced into the patient using any means known in the art, preferably in sterile form by intravenous, intracavitary, intraperitoneal or intratumor administration.

[1201] Routes and frequency of administration of the therapeutic compositions described herein, as well as dosage, will vary from individual to individual, and may be readily established using standard techniques. In general, the pharmaceutical compositions and vaccines may be administered by injection (e.g., intracutaneous, intramuscular, intravenous or subcutaneous), intranasally (e.g., by aspiration) or orally. Preferably, between 1 and 10 doses may be administered over a 52 week period. Preferably, 6 doses are administered, at intervals of 1 month, and booster vaccinations may be given periodically thereafter. Alternate protocols may be appropriate for individual patients. A suitable dose is an amount of a compound that, when administered as described above, is capable of promoting an anti-tumor immune response, and is at least 10-50% above the basal (i.e., untreated) level. Such response can be monitored by measuring the anti-tumor antibodies in a patient or by vaccine-dependent generation of cytolytic effector cells capable of killing the patient's tumor cells in vitro. Such vaccines should also be capable of causing an immune response that leads to an improved clinical outcome (e.g., more frequent remissions, complete or partial or longer disease-free survival) in vaccinated patients as compared to non-vaccinated patients. In general, for pharmaceutical compositions and vaccines comprising one or more polypeptides, the amount of each polypeptide present in a dose ranges from about 25 μg to 5 mg per kg of host. Suitable dose sizes will vary with the size of the patient, but will typically range from about 0.1 mL to about 5 mL.

[1202] In general, an appropriate dosage and treatment regimen provides the active compound(s) in an amount sufficient to provide therapeutic and/or prophylactic benefit. Such a response can be monitored by establishing an improved clinical outcome (e.g., more frequent remissions, complete or partial, or longer disease-free survival) in treated patients as compared to non-treated patients. Increases in preexisting immune responses to a tumor protein generally correlate with an improved clinical outcome. Such immune responses may generally be evaluated using standard proliferation, cytotoxicity or cytokine assays, which may be performed using samples obtained from a patient before and after treatment.

[1203] Cancer Detection and Diagnostic Compositions Methods and Kits

[1204] In general, a cancer may be detected in a patient based on the presence of one or more lung tumor proteins and/or polynucleotides encoding such proteins in a biological sample (for example, blood, sera, sputum urine and/or tumor biopsies) obtained from the patient. In other words, such proteins may be used as markers to indicate the presence or absence of a cancer such as lung cancer. In addition, such proteins may be useful for the detection of other cancers. The binding agents provided herein generally permit detection of the level of antigen that binds to the agent in the biological sample. Polynucleotide primers and probes may be used to detect the level of mRNA encoding a tumor protein, which is also indicative of the presence or absence of a cancer. In general, a lung tumor sequence should be present at a level that is at least three fold higher in tumor tissue than in normal tissue

[1205] There are a variety of assay formats known to those of ordinary skill in the art for using a binding agent to detect polypeptide markers in a sample. See, e.g., Harlow and Lane, Antibodies: A Laboratory Manual, Cold Spring Harbor Laboratory, 1988. In general, the presence or absence of a cancer in a patient may be determined by (a) contacting a biological sample obtained from a patient with a binding agent; (b) detecting in the sample a level of polypeptide that binds to the binding agent; and (c) comparing the level of polypeptide with a predetermined cut-off value.

[1206] In a preferred embodiment, the assay involves the use of binding agent immobilized on a solid support to bind to and remove the polypeptide from the remainder of the sample. The bound polypeptide may then be detected using a detection reagent that contains a reporter group and specifically binds to the binding agent/polypeptide complex. Such detection reagents may comprise, for example, a binding agent that specifically binds to the polypeptide or an antibody or other agent that specifically binds to the binding agent, such as an anti-immunoglobulin, protein G, protein A or a lectin. Alternatively, a competitive assay may be utilized, in which a polypeptide is labeled with a reporter group and allowed to bind to the immobilized binding agent after incubation of the binding agent with the sample. The extent to which components of the sample inhibit the binding of the labeled polypeptide to the binding agent is indicative of the reactivity of the sample with the immobilized binding agent. Suitable polypeptides for use within such assays include full length lung tumor proteins and polypeptide portions thereof to which the binding agent binds, as described above.

[1207] The solid support may be any material known to those of ordinary skill in the art to which the tumor protein may be attached. For example, the solid support may be a test well in a microtiter plate or a nitrocellulose or other suitable membrane. Alternatively, the support may be a bead or disc, such as glass, fiberglass, latex or a plastic material such as polystyrene or polyvinylchloride. The support may also be a magnetic particle or a fiber optic sensor, such as those disclosed, for example, in U.S. Pat. No.5,359,681. The binding agent may be immobilized on the solid support using a variety of techniques known to those of skill in the art, which are amply described in the patent and scientific literature. In the context of the present invention, the term “immobilization” refers to both noncovalent association, such as adsorption, and covalent attachment (which may be a direct linkage between the agent and functional groups on the support or may be a linkage by way of a cross-linking agent). Immobilization by adsorption to a well in a microtiter plate or to a membrane is preferred. In such cases, adsorption may be achieved by contacting the binding agent, in a suitable buffer, with the solid support for a suitable amount of time. The contact time varies with temperature, but is typically between about 1 hour and about 1 day. In general, contacting a well of a plastic microtiter plate (such as polystyrene or polyvinylchloride) with an amount of binding agent ranging from about 10 ng to about 10 μg, and preferably about 100 ng to about 1 μg, is sufficient to immobilize an adequate amount of binding agent.

[1208] Covalent attachment of binding agent to a solid support may generally be achieved by first reacting the support with a bifunctional reagent that will react with both the support and a functional group, such as a hydroxyl or amino group, on the binding agent. For example, the binding agent may be covalently attached to supports having an appropriate polymer coating using benzoquinone or by condensation of an aldehyde group on the support with an amine and an active hydrogen on the binding partner (see, e.g., Pierce Immunotechnology Catalog and Handbook, 1991, at A12-A13).

[1209] In certain embodiments, the assay is a two-antibody sandwich assay. This assay may be performed by first contacting an antibody that has been immobilized on a solid support, commonly the well of a microtiter plate, with the sample, such that polypeptides within the sample are allowed to bind to the immobilized antibody. Unbound sample is then removed from the immobilized polypeptide-antibody complexes and a detection reagent (preferably a second antibody capable of binding to a different site on the polypeptide) containing a reporter group is added. The amount of detection reagent that remains bound to the solid support is then determined using a method appropriate for the specific reporter group.

[1210] More specifically, once the antibody is immobilized on the support as described above, the remaining protein binding sites on the support are typically blocked. Any suitable blocking agent known to those of ordinary skill in the art, such as bovine serum albumin or Tween 20™ (Sigma Chemical Co., St. Louis, Mo.). The immobilized antibody is then incubated with the sample, and polypeptide is allowed to bind to the antibody. The sample may be diluted with a suitable diluent, such as phosphate-buffered saline (PBS) prior to incubation. In general, an appropriate contact time (i.e., incubation time) is a period of time that is sufficient to detect the presence of polypeptide within a sample obtained from an individual with lung cancer. Preferably, the contact time is sufficient to achieve a level of binding that is at least about 95% of that achieved at equilibrium between bound and unbound polypeptide. Those of ordinary skill in the art will recognize that the time necessary to achieve equilibrium may be readily determined by assaying the level of binding that occurs over a period of time. At room temperature, an incubation time of about 30 minutes is generally sufficient.

[1211] Unbound sample may then be removed by washing the solid support with an appropriate buffer, such as PBS containing 0.1% Tween 20™. The second antibody, which contains a reporter group, may then be added to the solid support. Preferred reporter groups include those groups recited above.

[1212] The detection reagent is then incubated with the immobilized antibody-polypeptide complex for an amount of time sufficient to detect the bound polypeptide. An appropriate amount of time may generally be determined by assaying the level of binding that occurs over a period of time. Unbound detection reagent is then removed and bound detection reagent is detected using the reporter group. The method employed for detecting the reporter group depends upon the nature of the reporter group. For radioactive groups, scintillation counting or autoradiographic methods are generally appropriate. Spectroscopic methods may be used to detect dyes, luminescent groups and fluorescent groups. Biotin may be detected using avidin, coupled to a different reporter group (commonly a radioactive or fluorescent group or an enzyme). Enzyme reporter groups may generally be detected by the addition of substrate (generally for a specific period of time), followed by spectroscopic or other analysis of the reaction products.

[1213] To determine the presence or absence of a cancer, such as lung cancer, the signal detected from the reporter group that remains bound to the solid support is generally compared to a signal that corresponds to a predetermined cut-off value. In one preferred embodiment, the cut-off value for the detection of a cancer is the average mean signal obtained when the immobilized antibody is incubated with samples from patients without the cancer. In general, a sample generating a signal that is three standard deviations above the predetermined cut-off value is considered positive for the cancer. In an alternate preferred embodiment, the cut-off value is determined using a Receiver Operator Curve, according to the method of Sackett et al., Clinical Epidemiology: A Basic Science for Clinical Medicine, Little Brown and Co., 1985, p. 106-7. Briefly, in this embodiment, the cut-off value may be determined from a plot of pairs of true positive rates (i e., sensitivity) and false positive rates (100%-specificity) that correspond to each possible cut-off value for the diagnostic test result. The cut-off value on the plot that is the closest to the upper left-hand corner (i.e., the value that encloses the largest area) is the most accurate cut-off value, and a sample generating a signal that is higher than the cut-off value determined by this method may be considered positive. Alternatively, the cut-off value may be shifted to the left along the plot, to minimize the false positive rate, or to the right, to minimize the false negative rate. In general, a sample generating a signal that is higher than the cut-off value determined by this method is considered positive for a cancer.

[1214] In a related embodiment, the assay is performed in a flow-through or strip test format, wherein the binding agent is immobilized on a membrane, such as nitrocellulose. In the flow-through test, polypeptides within the sample bind to the immobilized binding agent as the sample passes through the membrane. A second, labeled binding agent then binds to the binding agent-polypeptide complex as a solution containing the second binding agent flows through the membrane. The detection of bound second binding agent may then be performed as described above. In the strip test format, one end of the membrane to which binding agent is bound is immersed in a solution containing the sample. The sample migrates along the membrane through a region containing second binding agent and to the area of immobilized binding agent. Concentration of second binding agent at the area of immobilized antibody indicates the presence of a cancer. Typically, the concentration of second binding agent at that site generates a pattern, such as a line, that can be read visually. The absence of such a pattern indicates a negative result. In general, the amount of binding agent immobilized on the membrane is selected to generate a visually discernible pattern when the biological sample contains a level of polypeptide that would be sufficient to generate a positive signal in the two-antibody sandwich assay, in the format discussed above. Preferred binding agents for use in such assays are antibodies and antigen-binding fragments thereof. Preferably, the amount of antibody immobilized on the membrane ranges from about 25 ng to about 1 μg, and more preferably from about 50 ng to about 500 ng. Such tests can typically be performed with a very small amount of biological sample.

[1215] Of course, numerous other assay protocols exist that are suitable for use with the tumor proteins or binding agents of the present invention. The above descriptions are intended to be exemplary only. For example, it will be apparent to those of ordinary skill in the art that the above protocols may be readily modified to use tumor polypeptides to detect antibodies that bind to such polypeptides in a biological sample. The detection of such tumor protein specific antibodies may correlate with the presence of a cancer.

[1216] A cancer may also, or alternatively, be detected based on the presence of T cells that specifically react with a tumor protein in a biological sample. Within certain methods, a biological sample comprising CD4⁺ and/or CD8⁺ T cells isolated from a patient is incubated with a tumor polypeptide, a polynucleotide encoding such a polypeptide and/or an APC that expresses at least an immunogenic portion of such a polypeptide, and the presence or absence of specific activation of the T cells is detected. Suitable biological samples include, but are not limited to, isolated T cells. For example, T cells may be isolated from a patient by routine techniques (such as by Ficoll/Hypaque density gradient centrifugation of peripheral blood lymphocytes). T cells may be incubated in vitro for 2-9 days (typically 4 days) at 37° C. with polypeptide (e.g., 5 - 25 μg/ml). It may be desirable to incubate another aliquot of a T cell sample in the absence of tumor polypeptide to serve as a control. For CD4⁺ T cells, activation is preferably detected by evaluating proliferation of the T cells. For CD8⁺ T cells, activation is preferably detected by evaluating cytolytic activity. A level of proliferation that is at least two fold greater and/or a level of cytolytic activity that is at least 20% greater than in disease-free patients indicates the presence of a cancer in the patient.

[1217] As noted above, a cancer may also, or alternatively, be detected based on the level of mRNA encoding a tumor protein in a biological sample. For example, at least two oligonucleotide primers may be employed in a polymerase chain reaction (PCR) based assay to amplify a portion of a tumor cDNA derived from a biological sample, wherein at least one of the oligonucleotide primers is specific for (i.e., hybridizes to) a polynucleotide encoding the tumor protein. The amplified cDNA is then separated and detected using techniques well known in the art, such as gel electrophoresis. Similarly, oligonucleotide probes that specifically hybridize to a polynucleotide encoding a tumor protein may be used in a hybridization assay to detect the presence of polynucleotide encoding the tumor protein in a biological sample.

[1218] To permit hybridization under assay conditions, oligonucleotide primers and probes should comprise an oligonucleotide sequence that has at least about 60%, preferably at least about 75% and more preferably at least about 90%, identity to a portion of a polynucleotide encoding a tumor protein of the invention that is at least 10 nucleotides, and preferably at least 20 nucleotides, in length. Preferably, oligonucleotide primers and/or probes hybridize to a polynucleotide encoding a polypeptide described herein under moderately stringent conditions, as defined above. Oligonucleotide primers and/or probes which may be usefully employed in the diagnostic methods described herein preferably are at least 10-40 nucleotides in length. In a preferred embodiment, the oligonucleotide primers comprise at least 10 contiguous nucleotides, more preferably at least 15 contiguous nucleotides, of a DNA molecule having a sequence as disclosed herein. Techniques for both PCR based assays and hybridization assays are well known in the art (see, for example, Mullis et al., Cold Spring Harbor Symp. Quant. Biol., 51:263, 1987; Erlich ed., PCR Technology, Stockton Press, NY, 1989).

[1219] One preferred assay employs RT-PCR, in which PCR is applied in conjunction with reverse transcription. Typically, RNA is extracted from a biological sample, such as biopsy tissue, and is reverse transcribed to produce cDNA molecules. PCR amplification using at least one specific primer generates a cDNA molecule, which may be separated and visualized using, for example, gel electrophoresis. Amplification may be performed on biological samples taken from a test patient and from an individual who is not afflicted with a cancer. The amplification reaction may be performed on several dilutions of cDNA spanning two orders of magnitude. A two-fold or greater increase in expression in several dilutions of the test patient sample as compared to the same dilutions of the non-cancerous sample is typically considered positive.

[1220] In another embodiment, the compositions described herein may be used as markers for the progression of cancer. In this embodiment, assays as described above for the diagnosis of a cancer may be performed over time, and the change in the level of reactive polypeptide(s) or polynucleotide(s) evaluated. For example, the assays may be performed every 24-72 hours for a period of 6 months to 1 year, and thereafter performed as needed. In general, a cancer is progressing in those patients in whom the level of polypeptide or polynucleotide detected increases over time. In contrast, the cancer is not progressing when the level of reactive polypeptide or polynucleotide either remains constant or decreases with time.

[1221] Certain in vivo diagnostic assays may be performed directly on a tumor. One such assay involves contacting tumor cells with a binding agent. The bound binding agent may then be detected directly or indirectly via a reporter group. Such binding agents may also be used in histological applications. Alternatively, polynucleotide probes may be used within such applications.

[1222] As noted above, to improve sensitivity, multiple tumor protein markers may be assayed within a given sample. It will be apparent that binding agents specific for different proteins provided herein may be combined within a single assay. Further, multiple primers or probes may be used concurrently. The selection of tumor protein markers may be based on routine experiments to determine combinations that results in optimal sensitivity. In addition, or alternatively, assays for tumor proteins provided herein may be combined with assays for other known tumor antigens.

[1223] The present invention further provides kits for use within any of the above diagnostic methods. Such kits typically comprise two or more components necessary for performing a diagnostic assay. Components may be compounds, reagents, containers and/or equipment. For example, one container within a kit may contain a monoclonal antibody or fragment thereof that specifically binds to a tumor protein. Such antibodies or fragments may be provided attached to a support material, as described above. One or more additional containers may enclose elements, such as reagents or buffers, to be used in the assay. Such kits may also, or alternatively, contain a detection reagent as described above that contains a reporter group suitable for direct or indirect detection of antibody binding.

[1224] Alternatively, a kit may be designed to detect the level of mRNA encoding a tumor protein in a biological sample. Such kits generally comprise at least one oligonucleotide probe or primer, as described above, that hybridizes to a polynucleotide encoding a tumor protein. Such an oligonucleotide may be used, for example, within a PCR or hybridization assay. Additional components that may be present within such kits include a second oligonucleotide and/or a diagnostic reagent or container to facilitate the detection of a polynucleotide encoding a tumor protein.

[1225] The following Examples are offered by way of illustration and not by way of limitation.

### EXAMPLE 1

### Identification and Characterization of Lung Tumor cDNAS

[1226] This Example illustrates the identification of cDNA molecules encoding lung tumor proteins.

[1227] A. Isolation of cDNA Sequences from Lung Adenocarcinoma Libraries using Conventional cDNA Library Subtraction

[1228] A human lung adenocarcinoma cDNA expression library was constructed from poly A⁺ RNA from patient tissues (# 40031486) using a Superscript Plasmid System for cDNA Synthesis and Plasmid Cloning kit (BRL Life Technologies, Gaithersburg, Md.) following the manufacturer's protocol. Specifically, lung carcinoma tissues were homogenized with polytron (Kinematica, Switzerland) and total RNA was extracted using Trizol reagent (BRL Life Technologies) as directed by the manufacturer. The poly A⁺ RNA was then purified using an oligo dT cellulose column as described in Sambrook et al., Molecular Cloning: A Laboratory Manual, Cold Spring Harbor Laboratories, Cold Spring Harbor, N.Y., 1989. First-strand cDNA was synthesized using the NotI/Oligo-dT18 primer. Double-stranded cDNA was synthesized, ligated with BstXI/EcoRI adaptors (Invitrogen, San Diego, Calif.) and digested with NotI. Following size fractionation with cDNA size fractionation columns (BRL Life Technologies), the cDNA was ligated into the BstXI/NotI site of pcDNA3.1 (Invitrogen) and transformed into ElectroMax E. coli DH10B cells (BRL Life Technologies) by electroporation. A total of 3×10⁶ independent colonies were generated.

[1229] Using the same procedure, a normal human cDNA expression library was prepared from a panel of normal tissue specimens, including lung, liver, pancreas, skin, kidney, brain and resting PBMC.

[1230] cDNA library subtraction was performed using the above lung adenocarcinoma and normal tissue cDNA libraries, as described by Hara et al. (Blood, 84:189-199, 1994) with some modifications. Specifically, a lung adenocarcinoma-specific subtracted cDNA library was generated as follows. The normal tissue cDNA library (80 μg) was digested with BamHI and XhoI, followed by a filling-in reaction with DNA polymerase Klenow fragment. After phenol-chloroform extraction and ethanol precipitation, the DNA was dissolved in 133 μl of H₂O, heat-denatured and mixed with 133 μl (133 μg) of Photoprobe biotin (Vector Laboratories, Burlingame, Calif.). As recommended by the manufacturer, the resulting mixture was irradiated with a 270 W sunlamp on ice for 20 minutes. Additional Photoprobe biotin (67 μl) was added and the biotinylation reaction was repeated. After extraction with butanol five times, the DNA was ethanol-precipitated and dissolved in 23 μl H₂O. The resulting DNA, plus other highly redundant cDNA clones that were frequently recovered in previous lung subtractions formed the driver DNA.

[1231] To form the tracer DNA, 10 gg lung adenocarcinoma cDNA library was digested with NotI and SpeI, phenol chloroform extracted and passed through Chroma spin-400 columns (Clontech, Palo Alto, Calif.). Typically, 5 μg of cDNA was recovered after the sizing column. Following ethanol precipitation, the tracer DNA was dissolved in 5 μl H₂O. Tracer DNA was mixed with 15 μl driver DNA and 20 μl of 2× hybridization buffer (1.5 M NaCl/10 mM EDTA/50 mM HEPES pH 7.5/0.2% sodium dodecyl sulfate), overlaid with mineral oil, and heat-denatured completely. The sample was immediately transferred into a 68° C. water bath and incubated for 20 hours (long hybridization [LH]). The reaction mixture was then subjected to a streptavidin treatment followed by phenol/chloroform extraction. This process was repeated three more times. Subtracted DNA was precipitated, dissolved in 12 μl H₂O, mixed with 8 μl driver DNA and 20 μl of 2× hybridization buffer, and subjected to a hybridization at 68° C. for 2 hours (short hybridization [SH]). After removal of biotinylated double-stranded DNA, subtracted cDNA was ligated into NotI/SpeI site of chloramphenicol resistant pBCSK⁺ (Stratagene, La Jolla, Calif.) and transformed into ElectroMax E. coli DH10B cells by electroporation to generate a lung adenocarcinoma specific subtracted cDNA library, referred to as LAT-S 1 Similarly, LAT-S2 was generated by including 23 genes that were over-expressed in the tracer as additional drivers.

[1232] A second human lung adenocarcinoma cDNA expression library was constructed using adenocarcinoma tissue from a second patient (#86-66) and used to prepare a second lung adenocarcinoma-specific subtracted cDNA library (referred to as LAT2-S2), as described above, using the same panel of normal tissues and the additional genes over-expressed in LAT-S1.

[1233] A third human metastatic lung adenocarcinoma library was constructed from a pool of two lung pleural effusions with lung and gastric adenocarcinoma origins. The subtracted cDNA library, referred to as Mets-sub2, was generated as described above using the same panel of normal tissues. The Mets-sub3 subtracted library was constructed by including 51 additional genes as drivers. These 51 genes were recovered in Mets-sub2, representing over-expressed housekeeping genes in the testers.

[1234] A total of 16 cDNA fragments isolated from LAT-S1, 585 cDNA fragments isolated from LAT-S2, 568 cDNA clones from LAT2-S2, 15 cDNA clones from Mets-sub2 and 343 cDNA clones from Mets-sub3, described above, were colony PCR amplified and their mRNA expression levels in lung tumor, normal lung, and various other normal and tumor tissues were determined using microarray technology (Incyte, Palo Alto, Calif.). Briefly, the PCR amplification products were dotted onto slides in an array format, with each product occupying a unique location in the array. mRNA was extracted from the tissue sample to be tested, reverse transcribed, and fluorescent-labeled cDNA probes were generated. The microarrays were probed with the labeled cDNA probes, the slides scanned and fluorescence intensity was measured. This intensity correlates with the hybridization intensity. Seventy-three non-redundant cDNA clones, of which 42 were found to be unique, showed over-expression in lung tumors, with expression in normal tissues tested (lung, skin, lymph node, colon, liver, pancreas, breast, heart, bone marrow, large intestine, kidney, stomach, brain, small intestine, bladder and salivary gland) being either undetectable, or at significantly lower levels compared to lung adenocarcinoma tumors. These clones were further characterized by DNA sequencing with a Perkin Elmer/Applied Biosystems Division Automated Sequencer Model 373A and/or Model 377 (Foster City, Calif.).

[1235] The sequences were compared to known sequences in the gene bank using the EMBL GenBank databases (release 96). No significant homologies were found to the sequence provided in SEQ ID NO: 67, with no apparent homology to previously identified expressed sequence tags (ESTs). The sequences of SEQ ID NO: 60, 62, 65, 66, 69-71, 74, 76, 79, 80, 84, 86, 89-92, 95, 97 and 98 were found to show some homology to previously identified expressed sequence tags (ESTs). The cDNA sequences of SEQ ID NO: 59, 61, 63, 64, 67, 68, 72, 73, 75, 77, 78, 81-83, 85, 87, 88, 93, 94, 96, 99 and 100 showed homology to previously identified genes. The full-length cDNA sequences for the clones of SEQ ID NO: 96 and 100 are provided in SEQ ID NO: 316 and 318, respectively. The amino acid sequences for the clones of SEQ ID NO: 59, 61, 63, 64, 68, 73, 82, 83, 94, 96 and 100 are provided in SEQ ID NO: 331, 328, 329, 332, 327, 333, 330, 326, 325, 324 and 335, respectively. The amino acid sequence encoded by the sequence of SEQ ID NO: 69 (referred to as L552S) is provided in SEQ ID NO: 786.

[1236] Further studies led to the isolation of an extended cDNA sequence, and open reading frame, for L552S (SEQ ID NO: 790). The amino acid sequence encoded by the cDNA sequence of SEQ ID NO: 790 is provided in SEQ ID NO: 791. The determined cDNA sequence of an isoform of L552S is provided in SEQ ID NO: 792, with the corresponding amino acid sequence being provided in SEQ ID NO: 793. Subsequent studies led to the isolation of the full-length cDNA sequence of L552S (SEQ ID NO: 808). The corresponding amino acid sequence is provided in SEQ ID NO: 809. No homologies were found to the protein sequence of L552S. However, nucleotides 533-769 of the full-length cDNA sequence were found to show homology to a previously identified DNA sequence.

[1237] Comparison of the full-length cDNA and amino acid sequences for L552S with those in Genbank revealed that the amino acid sequence provided in SEQ ID NO: 809 is partially identical to that of the XAGE-1 protein (Pastan et al. Cancer Research 60:4752-4755 (2000)). However the N-terminal portion of L552S (amino acids 1-64 of SEQ ID NO: 809) does not match that of the XAGE-1 protein and appears to be unique. The amino acid sequence of this N-terminal portion is provided in SEQ ID NO: 1830, with the corresponding cDNA sequence being provided in SEQ ID NO: 1826. The cDNA sequences provided in SEQ ID NO: 1827-1829 represent bp 394-681 of SEQ ID NO: 808, bp394-534 of SEQ ID NO: 808 and bp 214-394 of SEQ ID NO: 792, respectively, with the corresponding amino acid sequences being provided in SEQ ID NO: 1831-1833.

[1238] Full-length cloning efforts on L552S led to the isolation of three additional cDNA sequences (SEQ ID NO: 810-812; referred to as clones 50989, 50990 and 50992, respectively) from a metastatic lung adenocarcinoma library. The sequence of SEQ ID NO: 810 was found to show some homology to previously identified human DNA sequences. The sequence of SEQ ID NO: 811 was found to show some homology to a previously identified DNA sequence. The sequence of SEQ ID NO: 812 was found to show some homology to previously identified ESTs.

[1239] The gene of SEQ ID NO: 84 (referred to as L55 IS) was determined by real-time RT-PCR analysis to be over-expressed in 2/9 primary adenocarcinomas and to be expressed at lower levels in 2/2 metastatic adenocarcinomas and 1/2 squamous cell carcinomas. No expression was observed in normal tissues, with the exception of very low expression in normal stomach. Further studies on L551S led to the isolation of the 5′ and 3′ cDNA consensus sequences provided in SEQ ID NO: 801 and 802, respectively. The L551S 5′ sequence was found to show some homology to the previously identified gene STY8 (cDNA sequence provided in SEQ ID NO: 803; corresponding amino acid sequence provided in SEQ ID NO: 805), which is a mitogen activated protein kinase phosphatase. However, no significant homologies were found to the 3′ sequence of L551S. Subsequently, an extended cDNA sequence for L551S was isolated (SEQ ID NO: 804). The corresponding amino acid sequence is provided in SEQ ID NO: 806. Further studies led to the isolation of two independent full-length clones for L551S (referred to as 54298 and 54305). These two clones have five nucleotide differences compared to the STY8 DNA sequence. Two of these differences are single nucleotide polymorphisms which do not effect the encoded amino acid sequences. The other three nucleotide differences are consistent between the two L551S clones but lead to encoded amino acid sequences that are different from the STY8 protein sequence. The determined cDNA sequences for the L551 S full-length clones 54305 and 54298 are provided in SEQ ID NO: 825 and 826, respectively, with the amino acid sequence for L551S being provided in SEQ ID NO: 827.

[1240] B. Isolation of cDNA Sequences from Lung Adenocarcinoma Libraries using PCR-Based cDNA Library Subtraction

[1241] cDNA clones from a subtracted library, containing cDNA from a pool of two human lung primary adenocarcinomas subtracted against a pool of nine normal human tissue cDNAs including skin, colon, lung, esophagus, brain, kidney, spleen, pancreas and liver, (Clontech, Palo Alto, Calif.) were submitted to a first round of PCR amplification. This library (referred to as ALT-1) was subjected to a second round of PCR amplification, following the manufacturer's protocol. The expression levels of 760 cDNA clones in lung tumor, normal lung, and various other normal and tumor tissues, were examined using microarray technology as described above. A total of 118 clones, of which 55 were unique, were found to be over-expressed in lung tumor tissue, with expression in normal tissues tested (lung, skin, lymph node, colon, liver, pancreas, breast, heart, bone marrow, large intestine, kidney, stomach, brain, small intestine, bladder and salivary gland) being either undetectable, or at significantly lower levels. The sequences were compared to known sequences in the gene bank using the EMBL and GenBank databases (release 96). No significant homologies (including ESTs) were found to the sequence provided in SEQ ID NO: 44. The sequences of SEQ ID NO: 1, 11, 13, 15,20,23-27,29,30,33, 34,39,41,43, 45, 46, 51 and 57 were found to show some homology to previously identified expressed sequence tags (ESTs). The cDNA sequences of SEQ ID NO: 2-10, 12, 14, 16-19, 21, 22, 28, 31, 32, 35-38, 40, 42, 44, 47-50, 52-56 and 58 showed homology to previously identified genes. The full-length cDNA sequences for the clones of SEQ ID NO: 18, 22, 31, 35, 36 and 42 are provided in SEQ ID NO: 320, 319, 323, 321, 317, 321 and 322, respectively, with the corresponding amino acid sequences being provided in SEQ ID NO: 337, 336, 340, 338, 334, and 339, respectively.

[1242] Further studies led to the isolation of an extended cDNA sequence for the clone of SEQ ID NO: 33 (referred to as L801P). This extended cDNA sequence (provided in SEQ ID NO: 796), was found to contain three potential open reading frames (ORFs). The predicted amino acid sequences encoded by these three ORFs are provided in SEQ ID NO: 797-799, respectively. Additional full-length cloning efforts led to still further extended cDNA sequence for L801P, set forth in SEQ ID NO:1669, in addition to five potential open reading frames (referred to as ORFs 4-9; SEQ ID NOs: 1670-1675, respectively) encoded by the extended cDNA sequence. L801P was mapped to chromosomal region 20p13 and a 137 amino acid ORF from this genomic region was identified that corresponds to ORF4 (SEQ ID NO: 1670), suggesting that this is likely an authentic ORF for L801P.

[1243] By microarray analysis, L801P was found to be overexpressed by 2-fold or greater in lung tumor tissue compared to normal tissue. By real-time PCR analysis, greater than 50% of lung adenocarcinoma and greater than 30% of lung squamous cell carcinoma tumor samples tested had elevated L801P expression relative to normal lung tissue. Of those that displayed elevated L801 P, the level of expression was greater than 10-fold higher than in normal lung tissue samples. Moreover, low or no expression of L801P was detected in an extensive panel of normal tissue RNAs.

[1244] L801P expression was also detected in a number of other tumor types, including breast, prostate, ovarian and colon tumors, and thus may have diagnostic and/or therapeutic utility in these cancer types.

[1245] In subsequent studies, a full-length cDNA sequence for the clone of SEQ ID NO: 44 (referred to as L844P) was isolated (provided in SEQ ID NO: 800). Comparison of this sequence with those in the public databases revealed that the 470 bases at the 5′ end of the sequence show homology to the known gene dihydrodiol dehydrogenase, thus indicating that L844P is a novel transcript of the dihydrodiol dehydrogenase family having 2007 base pairs of previously unidentified 3′ untranslated region.

[1246] The predicted amino acid sequence encoded by the sequence of SEQ ID NO: 46 (referred to as L840P) is provided in SEQ ID NO: 787. An extended cDNA sequence for L840P, which was determined to include an open reading frame, is provided in SEQ ID NO: 794. The predicted amino acid sequence encoded by the cDNA sequence of SEQ ID NO: 794 is provided in SEQ ID NO: 795. The full-length cDNA sequence for the clone of SEQ ID NO: 54 (referred to as L548S) is provided in SEQ ID NO: 788, with the corresponding amino acid sequence being provided in SEQ ID NO: 789.

[1247] Northern blot analyses of the genes of SEQ ID NO: 25 and 46 (referred to as L839P and L840P, respectively) were remarkably similar. Both genes were expressed in 1/2 lung adenocarcinomas as two bands of 3.6 kb and 1.6 kb. No expression of L839P was observed in normal lung or trachea. No expression of L840P was observed in normal bone marrow, resting or activated PBMC, esophagus, or normal lung. Given the similar expression patterns, L839P and L840P may be derived from the same gene.

[1248] Additional lung adenocarcinoma cDNA clones were isolated as follows. A cDNA library was prepared from a pool of two lung adenocarcinomas and subtracted against cDNA from a panel of normal tissues including lung, brain, liver, kidney, pancreas, skin, heart and spleen. The subtraction was performed using a PCR-based protocol (Clontech), which was modified to generate larger fragments. Within this protocol, tester and driver double stranded cDNA were separately digested with five restriction enzymes that recognize six-nucleotide restriction sites (MluI, MscI, PvuII, SalI and StuI). This digestion resulted in an average cDNA size of 600 bp, rather than the average size of 300 bp that results from digestion with RsaI according to the Clontech protocol. The ends of the restriction digested tester cDNA were filled in to generate blunt ends for adapter ligation. This modification did not affect the subtraction efficiency. Two tester populations were then created with different adapters, and the driver library remained without adapters. The tester and driver libraries were then hybridized using excess driver cDNA. In the first hybridization step, driver was separately hybridized with each of the two tester cDNA populations. This resulted in populations of (a) unhybridized tester cDNAs, (b) tester cDNAs hybridized to other tester cDNAs, (c) tester cDNAs hybridized to driver cDNAs and (d) unhybridized driver cDNAs. The two separate hybridization reactions were then combined, and rehybridized in the presence of additional denatured driver cDNA. Following this second hybridization, in addition to populations (a) through (d), a fifth population (e) was generated in which tester cDNA with one adapter hybridized to tester cDNA with the second adapter. Accordingly, the second hybridization step resulted in enrichment of differentially expressed sequences which could be used as templates for PCR amplification with adaptor-specific primers.

[1249] The ends were then filled in, and PCR amplification was performed using adaptor-specific primers. Only population (e), which contained tester cDNA that did not hybridize to driver cDNA, was amplified exponentially. A second PCR amplification step was then performed, to reduce background and further enrich differentially expressed sequences.

[1250] Fifty-seven cDNA clones were isolated from the subtracted library (referred to as LAP1) and sequenced. The determined cDNA sequences for 16 of these clones are provided in SEQ ID NO: 101-116. The sequences of SEQ ID NO: 101 and 114 showed no significant homologies to previously identified sequences. The sequences of SEQ ID NO: 102-109 and 112 showed some similarity to previously identified sequences, while the sequences of SEQ ID NO: 113, 115 and 116 showed some similarity to previously isolated ESTs.

[1251] An additional 502 clones analyzed from the LAP1 library were sequenced and the determined cDNA sequences are shown in SEQ ID NO:828-1239 and 1564-1653.

[1252] C. Isolation of cDNA Sequences from Small Cell Lung Carcinoma Libraries using PCR-Based cDNA Library Subtraction

[1253] A subtracted cDNA library for small cell lung carcinoma (referred to as SCL1) was prepared essentially using the modified PCR-based subtraction process described above. cDNA from small cell lung carcinoma was subtracted against cDNA from a panel of normal tissues, including normal lung, brain, kidney, liver, pancreas, skin, heart, lymph node and spleen. Both tester and driver poly A+ RNA were initially amplified using SMART PCR cDNA synthesis kit (Clontech, Palo Alto, Calif.). The tester and driver double stranded cDNA were separately digested with five restriction enzymes (DraI, MscI, PvuII, SmaI, and StuI). These restriction enzymes generated blunt end cuts and the digestion resulted in an average insert size of 600 bp. Digestion with this set of restriction enzymes eliminates the step required to generate blunt ends by filling in of the cDNA ends. These modifications did not affect subtraction efficiency.

[1254] Eighty-five clones were isolated and sequenced. The determined cDNA sequences for 31 of these clones are provided in SEQ ID NO: 117-147. The sequences of SEQ ID NO: 122, 124, 126, 127, 130, 131, 133, 136, 139 and 147 showed no significant homologies to previously identified sequences. The sequences of SEQ ID NO: 120, 129, 135, 137, 140, 142, 144 and 145 showed some similarity to previously identified gene sequences, while the sequences of SEQ ID NO: 114, 118, 119, 121, 123, 125, 128, 132, 134, 138, 141, 143 and 147 showed some similarity to previously isolated ESTs.

[1255] In further studies, three additional cDNA libraries were generated from poly A+ RNA from a single small cell lung carcinoma sample subtracted against a pool of poly A+ RNA from nine normal tissues (lung, brain, kidney, liver, pancreas, skin, heart pituitary gland and spleen). For the first library (referred to as SCL2), the subtraction was carried out essentially as described above for the LAP1 library, with the exception that the tester and driver were digested with PvuII, StuI, MscI and DraI. The ratio of tester and driver cDNA used was as recommended by Clontech. For the second library (referred to as SCL3), subtraction was performed essentially as for SCL2 except that cDNA for highly redundant clones identified from the SCL2 library was included in the driver cDNA. Construction of the SCL4 library was performed essentially as described for the SCL3 library except that a higher ratio of driver to tester was employed.

[1256] Each library was characterized by DNA sequencing and database analyses. The determined cDNA sequence for 35 clones isolated from the SCL2 library are provided in SEQ ID NO: 245-279, with the determined cDNA sequences for 21 clones isolated from the SCL3 library and for 15 clones isolated from the SCL4 library being provided in SEQ ID NO: 280-300 and 301-315, respectively. The sequences of SEQ ID NO: 246, 254, 261, 262, 304, 309 and 311 showed no significant homologies to previously identified sequences. The sequence of SEQ ID NO: 245, 248, 255, 266, 270, 275, 280, 282, 283, 288-290, 292, 295, 301 and 303 showed some homology to previously isolated ESTs, while the sequences of SEQ ID NO: 247, 249-253, 256-260, 263-265, 267-269, 271-274, 276-279, 281, 284-287, 291, 293, 294, 296-300, 302, 305-308, 310 and 312-315 showed some homology to previously identified gene sequences. 3264 cDNA clones from three PCR-based subtracted cDNA libraries were analyzed by cDNA microarray technology (referred to as Lung Chip 5). Of the these cDNA clones, 960 clones came from SQL1 library, 768 clones came from SCL1 library, and 1536 clones came from SCL3 and SCL4 libraries. Thirty-five pairs of fluorescent labeled cDNA probes were used for the microarray analysis. Each probe pair included a lung tumor probe paired with a normal tissue probe. The expression data was analyzed. 498 cDNA clones were found to be overexpressed by 2-fold or greater in the small cell and/or non-small cell lung tumor probe groups compared to the normal tissue probe group. Also, the mean expression values for these clones in normal tissues were below 0.1 (range of expression is from 0.001 to 10). The cDNA sequences disclosed in SEQ ID NO:1240-1563 represent 324 non-redundant clones.

[1257] The following sequences were novel based on database analysis including GenBank and GeneSeq: SEQ ID NO:1240, 1243, 1247, 1269, 1272, 1280, 1283, 1285, 1286, 1289, 1300, 1309, 1318, 1319, 1327, 1335, 1339, 1346, 1359, 1369, 1370, 1371, 1393, 1398, 1405, 1408, 1413, 1414, 1417, 1422, 1429, 1432, 1435, 1436, 1438-1442, 1447, 1450, 1453, 1463, 1467, 1470, 1473, 1475, 1482, 1486, 1491-1494, 1501, 1505, 1506, 1514-1517, 1520, 1522, 1524, 1535, 1538, 1542, 1543, 1547, 1554, 1557, 1559, 1561, and 1563.

[1258] The extended cDNA sequence of the partial sequence of contig 139 (SEQ ID NO:1467), also known as L985P, was predicted by searching public databases using SEQ ID NO: 1467 as a query. By this approach, it was found that SEQ ID NO:1467 had homolgy to a cDNA sequence (SEQ ID NO:1676) which encodes the cell surface immunomodulator-2 (CSIMM-2). The cDNA sequence of SEQ ID NO:1676 encodes a protein having the sequence set forth in SEQ ID NO: 1677.

[1259] By microarray analysis, L985P was overexpressed by 2-fold or greater in the lung tumor probe groups compared to the normal tissue probe group. Moreover, the mean expression values for L985P in normal tissues was below 0.2 (range of expression was from 0.01 to 10). By real-time PCR analysis, greater than 40% of small cell lung carcinoma lung tumor samples tested had elevated L985P expression relative to normal lung tissue. Of those that displayed elevated L985P, the level of expression was greater than 3-fold higher than in normal lung tissue samples. Low or no expression of L985P was detected in an extensive panel of normal tissue RNAs. These findings for L985P support its use both as a diagnositic marker for detecting the presence of lung cancer in a patient and/or as a immunotherapeutic target for the treatment of lung cancer.

[1260] D. Isolation of cDNA Sequences from a Neuroendocrine Library using PCR-Based cDNA Library Subtraction

[1261] Using the modified PCR-based subtraction process, essentially as described above for the LAP1 subtracted library, a subtracted cDNA library (referred to as MLN1) was derived from a lung neuroendocrine carcinoma that had metastasized to the subcarinal lymph node, by subtraction with a panel of nine normal tissues, including normal lung, brain, kidney, liver, pancreas, skin, heart, lymph node and spleen.

[1262] Ninety-one individual clones were isolated and sequenced. The determined cDNA sequences for 58 of these clones are provided in SEQ ID NO: 147-222. The sequences of SEQ ID NO: 150, 151, 154, 157, 158, 159, 160, 163, 174, 175, 178, 186-190, 192, 193, 195-200, 208-210, 212-215 and 220 showed no significant homologies to previously identified sequences. The sequences of SEQ ID NO: 152, 155, 156, 161, 165, 166, 176, 179, 182, 184, 185, 191, 194, 221 and 222 showed some similarity to previously identified gene sequences, while the sequences of SEQ ID NO: 148, 149, 153, 164, 167-173, 177, 180, 181, 183, 201-207, 211 and 216-219 showed some similarity to previously isolated ESTs.

[1263] The determined cDNA sequences of an additional 442 clones isolated from the MLN1 library are provided in SEQ ID NO: 341-782, with the determined cDNA sequences of an additional 11 clones isolated from the MLNI library are provided in SEQ ID NO:1654-1664.

[1264] E. Isolation of cDNA Sequences from a Squamous Cell Lung Carcinoma Library using PCR-Based cDNA Library Subtraction A subtracted cDNA library for squamous cell lung carcinoma (referred to as SQL1) was prepared essentially using the modified PCR-based subtraction process described above, except the tester and driver double stranded cDNA were separately digested with four restriction enzymes (DraI, MscI, PvuII and StuI). cDNA from a pool of two squamous cell lung carcinomas was subtracted against cDNA from a pool of 10 normal tissues, including normal lung, brain, kidney, liver, pancreas, skin, heart, spleen, esophagus and trachea.

[1265] Seventy-four clones were isolated and sequenced. The determined cDNA sequences for 22 of these clones are provided in SEQ ID NO: 223-244. The sequence of SEQ ID NO: 241 showed no significant homologies to previously identified sequences. The sequences of SEQ ID NO: 223, 225, 232, 233, 235, 238, 239, 242 and 243 showed some similarity to previously identified gene sequences, while the sequences of SEQ ID NO: 224, 226-231, 234, 236, 237, 240, 241 and 244 showed some similarity to previously isolated ESTs.

[1266] The sequences of an additional 12 clones isolated during characterization of cDNA libraries prepared from lung tumor tissue are provided in SEQ ID NO: 813-824. Comparison of these sequences with those in the GenBank database and the GeneSeq DNA database revealed no significant homologies to previously identified sequences.

### EXAMPLE 2

### Synthesis of Polypeptides

[1267] Polypeptides may be synthesized on a Perkin Elmer/Applied Biosystems Division 430A peptide synthesizer using FMOC chemistry with HPTU (0-Benzotriazole-N,N,N′,N′-tetramethyluronium hexafluorophosphate) activation. A Gly-Cys-Gly sequence may be attached to the amino terminus of the peptide to provide a method of conjugation, binding to an immobilized surface, or labeling of the peptide. Cleavage of the peptides from the solid support may be carried out using the following cleavage mixture: trifluoroacetic acid:ethanedithiol:thioanisole:water :phenol (40:1:2:2:3). After cleaving for 2 hours, the peptides may be precipitated in cold methyl-t-butyl-ether. The peptide pellets may then be dissolved in water containing 0.1% trifluoroacetic acid (TFA) and lyophilized prior to purification by C18 reverse phase HPLC. A gradient of 0%-60% acetonitrile (containing 0.1% TFA) in water (containing 0.1% TFA) may be used to elute the peptides. Following lyophilization of the pure fractions, the peptides may be characterized using electrospray or other types of mass spectrometry and by amino acid analysis.

### EXAMPLE 3

### Expression in E. coli of L548S HIS Tag Fusion Protein

[1268] The L548S coding region was PCR amplified with the following primers:

[1269] Forward primer starting at amino acid 2:

[1270] PDM-433: 5′gctaaaggtgaccccaagaaaccaaag 3′Tm 60° C. (SEQ ID NO:1665)

[1271] Reverse primer creating a XhoI site after the stop codon:

[1272] PDM-438: 5′ ctattaactcgagggagacagataaacagtttcttta 3′ Tm 61° C. (SEQ ID NO:1666)

[1273] The PCR product was then digested with XhoI restriction enzyme, gel purified and then cloned into pPDM His, a modified pET28 vector with a His tag in frame, which had been digested with Eco72I and XhoI restriction enzymes. The correct construct was confirmed by DNA sequence analysis and then transformed into BL21 (DE3) pLys S and BL21 (DE3) CodonPlus RIL expression hosts. The protein sequence of expressed recombinant L548S is shown in SEQ ID NO:1667, and the DNA sequence of expressed recombinant L7548S is shown in SEQ ID NO: 1668.

### EXAMPLE 4

### Additional Analyses of Lung Chip 5 SQL1, SCL1, SCL3 and SCL4 Libraries

[1274] Additional analyses were performed on lung chip 5 using a criteria of greater than or equal to 2-fold over-expression in tumor probe groups versus normal tissues and an average expression in normal tissues of less than or equal to 0.2. This resulted in the identification of 109 non-redundant clones that are over-expressed in lung carcinomas. As summarized in the Table 10 below, 19 cDNA clones were recovered from the lung squamous cell carcinoma subtracted library SQL1, 9 cDNA clones were recovered from the small cell lung carcinoma library SCL1, and 81 cDNA clones were recovered from the small cell lung carcinoma libraries SCL3 and SCL4.

TABLE 10

| SEQ ID | | | | | Mean | Mean | |
|---|---|---|---|---|---|---|---|
| NO: | Seq. Ref. | Element (384) | Element (96) | Ratio | Signal 1 | Signal 2 | Library |
| 1680 | 58456 | p0003r03c13 | R0001 E7 | 3.09 | 0.424 | 0.137 | SQL1 |
| 1681 | 58458 | p0003r03c10 | R0001 F5 | 2.31 | 0.408 | 0.176 | SQL1 |
| 1682 | 58462 | p0003r04c16 | R0001 H8 | 2.22 | 0.257 | 0.116 | SQL1 |
| 1683 | 58469 | p0003r07c12 | R0002 F6 | 2.1 | 0.289 | 0.138 | SQL1 |
| 1684 | 58470 | p0003r09c21 | R0003 A11 | 2.55 | 0.493 | 0.194 | SQL1 |
| 1685 | 58482 | p0003r12c19 | R0003 G10 | 2.16 | 0.36 | 0.167 | SQL1 |
| 1686 | 58485 | p0003r12c10 | R0003 H5 | 2.48 | 0.273 | 0.11 | SQL1 |
| 1687 | 58501 | p0004r04c23 | R0005 G12 | 2.04 | 0.26 | 0.128 | SQL1 |
| 1688 | 58502 | p0004r04c03 | R0005 G2 | 2.17 | 0.289 | 0.133 | SQL1 |
| 1689 | 58505 | p0004r05c23 | R0006 A12 | 3.08 | 0.454 | 0.148 | SQL1 |
| 1690 | 58507 | p0004r06c11 | R0006 C6 | 3.22 | 0.49 | 0.152 | SOL1 |
| 1691 | 58509 | p0004r07c15 | R0006 E8 | 3.26 | 0.421 | 0.129 | SQL1 |
| 1692 | 58512 | p0004r09c03 | R0007 A2 | 3.16 | 0.559 | 0.177 | SQL1 |
| 1693 | 58527 | p0004r12c22 | R0007 H11 | 2.03 | 0.278 | 0.137 | SQL1 |
| 1694 | 58529 | p0004r14c09 | R0008 C5 | 2.26 | 0.45 | 0.199 | SQL1 |
| 1695 | 58531 | p0004r16c01 | R0008 G1 | 2.84 | 0.387 | 0.136 | SQL1 |
| 1696 | 58537 | p0005r02c08 | R0009 D4 | 2.03 | 0.355 | 0.175 | SQL1 |
| 1697 | 58539 | p0005r03c08 | R0009 F4 | 2.34 | 0.42 | 0.18 | SQL1 |
| 1698 | 58545 | p0005r07c21 | R0010 E11 | 2.96 | 0.361 | 0.122 | SQL1 |
| 1699 | 59319 | p0005r10c04 | R0011 D2 | 3.1 | 0.478 | 0.154 | SCL1 |
| 1700 | 59322 | p0005r12c01 | R0011 G1 | 2.16 | 0.255 | 0.118 | SCL1 |
| 1701 | 59348 | p0006r11c12 | R0015 F6 | 2.33 | 0.269 | 0.116 | SCL1 |
| 1702 | 59350 | p0006r14c13 | R0016 C7 | 2.41 | 0.447 | 0.185 | SCL1 |
| 1703 | 59363 | p0007r02c16 | R0017 D8 | 2.12 | 0.421 | 0.199 | SCL1 |
| 1704 | 59365 | p0007r03c20 | R0017 F10 | 3.07 | 0.584 | 0.19 | SCL1 |
| 1705 | 59370 | p0007r04c10 | R0017 H5 | 2.06 | 0.284 | 0.138 | SCL1 |
| 1706 | 59373 | p0007r05c23 | R0018 A12 | 2.95 | 0.472 | 0.16 | SCL1 |
| 1707 | 59376 | p0007r06c02 | R0018 D1 | 2.13 | 0.246 | 0.116 | SCL1 |
| 1708 | 61050 | p0011r02c10 | R0033 D5 | 2.23 | 0.306 | 0.137 | SCL3/4 |
| 1709 | 61051 | p0011r03c23 | R0033 E12 | 2.9 | 0.298 | 0.103 | SCL3/4 |
| 1710 | 61052 | p0011r03c08 | R0033 F4 | 2.18 | 0.265 | 0.122 | SCL3/4 |
| 1711 | 61054 | p0011r03c16 | R0033 F8 | 2.11 | 0.415 | 0.197 | SCL3/4 |
| 1712 | 61056 | p0011r04c13 | R0033 G7 | 2.73 | 0.314 | 0.115 | SCL3/4 |
| 1713 | 61057 | p0011r04c10 | R0033 H5 | 2.45 | 0.463 | 0.189 | SCL3/4 |
| 1714 | 61060 | p0011r05c11 | R0034 A6 | 3.28 | 0.536 | 0.164 | SCL3/4 |
| 1715 | 61062 | p0011r06c21 | R0034 C11 | 2.73 | 0.526 | 0.192 | SCL3/4 |
| 1716 | 61063 | p0011r06c05 | R0034 C3 | 3.61 | 0.513 | 0.142 | SCL3/4 |
| 1717 | 61064 | p0011r06c04 | R0034 D2 | 2.58 | 0.477 | 0.185 | SCL3/4 |
| 1718 | 61065 | p0011r06c14 | R0034 D7 | 4.91 | 0.55 | 0.112 | SCL3/4 |
| 1719 | 61066 | p0011r06c18 | R0034 D9 | 2.38 | 0.285 | 0.12 | SCL3/4 |
| 1720 | 61069 | p0011r07c16 | R0034 F8 | 2.25 | 0.426 | 0.189 | SCL3/4 |
| 1721 | 61070 | p0011r08c21 | R0034 G11 | 2 | 0.234 | 0.117 | SCL3/4 |
| 1722 | 61071 | p0011r08c03 | R0034 G2 | 2.76 | 0.321 | 0.116 | SCL3/4 |
| 1723 | 61074 | p0011r08c16 | R0034 H8 | 3.02 | 0.399 | 0.132 | SCL3/4 |
| 1724 | 61075 | p0011r09c05 | R0035 A3 | 3.83 | 0.498 | 0.13 | SCL3/4 |
| 1725 | 61077 | p0011r10c21 | R0035 C11 | 2.12 | 0.306 | 0.144 | SCL3/4 |
| 1726 | 61079 | p0011r11c23 | R0035 E12 | 2.04 | 0.22 | 0.108 | SCL3/4 |
| 1727 | 61080 | p0011r11c15 | R0035 E8 | 2.76 | 0.299 | 0.108 | SCL3/4 |
| 1728 | 61081 | p0011r11c14 | R0035 F7 | 2.37 | 0.303 | 0.128 | SCL3/4 |
| 1729 | 61083 | p0011r12c15 | R0035 G8 | 2.29 | 0.351 | 0.153 | SCL3/4 |
| 1730 | 61085 | p0011r13c05 | R0036 A3 | 2.62 | 0.43 | 0.164 | SCL3/4 |
| 1731 | 61086 | p0011r13c09 | R0036 A5 | 2.53 | 0.398 | 0.157 | SCL3/4 |
| 1732 | 61088 | p0011r14c05 | R0036 C3 | 4.26 | 0.702 | 0.165 | SCL3/4 |
| 1733 | 61090 | p0011r15c07 | R0036 E4 | 3.16 | 0.429 | 0.136 | SCL3/4 |
| 1734 | 61091 | p0011r16c16 | R0036 H8 | 3.54 | 0.634 | 0.179 | SCL3/4 |
| 1735 | 61093 | p0012r02c03 | R0037 C2 | 2.2 | 0.265 | 0.121 | SCL3/4 |
| 1736 | 61094 | p0012r02c11 | R0037 C6 | 15.17 | 1.79 | 0.118 | SCL3/4 |
| 1737 | 61096 | p0012r02c08 | R0037 D4 | 2.44 | 0.27 | 0.111 | SCL3/4 |
| 1738 | 61097 | p0012r02c10 | R0037 D5 | 4.52 | 0.81 | 0.179 | SCL3/4 |
| 1739 | 61099 | p0012r03c02 | R0037 F1 | 3.34 | 0.39 | 0.117 | SCL3/4 |
| 1740 | 61100 | p0012r03c06 | R0037 F3 | 2.03 | 0.233 | 0.114 | SCL3/4 |
| 1741 | 61103 | p0012r04c17 | R0037 G9 | 2.48 | 0.413 | 0.167 | SCL3/4 |
| 1742 | 61105 | p0012r05c11 | R0038 A6 | 3.26 | 0.501 | 0.154 | SCL3/4 |
| 1743 | 61106 | p0012r05c08 | R0038 B4 | 2.46 | 0.354 | 0.144 | SCL3/4 |
| 1744 | 61110 | p0012r06c15 | R0038 C8 | 2.18 | 0.41 | 0.188 | SCL3/4 |
| 1745 | 61113 | p0012r07c09 | R0038 E5 | 2.47 | 0.376 | 0.152 | SCL3/4 |
| 1746 | 61115 | p0012r07c13 | R0038 E7 | 2.57 | 0.483 | 0.188 | SCL3/4 |
| 1747 | 61117 | p0012r07c24 | R0038 F12 | 2.18 | 0.235 | 0.108 | SCL3/4 |
| 1748 | 61118 | p0012r07c18 | R0038 F9 | 4.44 | 0.605 | 0.136 | SCL3/4 |
| 1749 | 61119 | p0012r08c03 | R0038 G2 | 2.97 | 0.35 | 0.118 | SCL3/4 |
| 1750 | 61120 | p0012r08c07 | R0038 G4 | 2.23 | 0.323 | 0.144 | SCL3/4 |
| 1751 | 61122 | p0012r08c18 | R0038 H9 | 2.23 | 0.373 | 0.168 | SCL3/4 |
| 1752 | 61125 | p0012r10c17 | R0039 C9 | 2.1 | 0.22 | 0.105 | SCL3/4 |
| 1753 | 61126 | p0012r10c16 | R0039 D8 | 2.47 | 0.345 | 0.14 | SCL3/4 |
| 1754 | 61130 | p0012r12c12 | R0039 H6 | 2.66 | 0.282 | 0.106 | SCL3/4 |
| 1755 | 61133 | p0012r13c24 | R0040 B12 | 2.25 | 0.27 | 0.12 | SCL3/4 |
| 1756 | 61134 | p0012r14c23 | R0040 C12 | 2.23 | 0.228 | 0.102 | SCL3/4 |
| 1757 | 61135 | p0012r14c03 | R0040 C2 | 2.05 | 0.298 | 0.146 | SCL3/4 |
| 1758 | 61137 | p0012r14c02 | R0040 D1 | 8.63 | 1.463 | 0.17 | SCL3/4 |
| 1759 | 61139 | p0012r14c14 | R0040 D7 | 2.69 | 0.3 | 0.111 | SCL3/4 |
| 1760 | 61143 | p0012r16c02 | R0040 H1 | 2.55 | 0.318 | 0.125 | SCL3/4 |
| 1761 | 61144 | p0012r16c18 | R0040 H9 | 2.85 | 0.318 | 0.112 | SCL3/4 |
| 1762 | 61148 | p0013r02c19 | R0041 C10 | 2.33 | 0.463 | 0.199 | SCL3/4 |
| 1763 | 61151 | p0013r02c03 | R0041 C2 | 2.25 | 0.336 | 0.149 | SCL3/4 |
| 1764 | 61155 | p0013r04c07 | R0041 G4 | 2.13 | 0.366 | 0.171 | SCL3/4 |
| 1765 | 61156 | p0013r05c05 | R0042 A3 | 2.73 | 0.38 | 0.139 | SCL3/4 |
| 1766 | 61159 | p0013r06c24 | R0042 D12 | 4.57 | 0.831 | 0.182 | SCL3/4 |
| 1767 | 61160 | p0013r07c19 | R0042 E10 | 8.6 | 1.191 | 0.138 | SCL3/4 |
| 1768 | 61163 | p0013r07c18 | R0042 F9 | 2.18 | 0.278 | 0.128 | SCL3/4 |
| 1769 | 61167 | p0013r10c12 | R0043 D6 | 3.13 | 0.39 | 0.124 | SCL3/4 |
| 1770 | 61172 | p0013r12c03 | R0043 G2 | 2 | 0.396 | 0.198 | SCL3/4 |
| 1771 | 61173 | p0013r12c07 | R0043 G4 | 3.73 | 0.72 | 0.193 | SCL3/4 |
| 1772 | 61176 | p0013r13c04 | R0044 B2 | 2.34 | 0.446 | 0.19 | SCL3/4 |
| 1773 | 61177 | p0013r14c01 | R0044 C1 | 3.9 | 0.539 | 0.138 | SCL3/4 |
| 1774 | 61183 | p0013r15c14 | R0044 F7 | 5.49 | 0.959 | 0.175 | SCL3/4 |
| 1775 | 61185 | p0013r16c24 | R0044 H12 | 2.25 | 0.409 | 0.182 | SCL3/4 |
| 1776 | 61188 | p0014r01c07 | R0045 A4 | 2.14 | 0.271 | 0.127 | SCL3/4 |
| 1777 | 61192 | p0014r02c19 | R0045 C10 | 2.33 | 0.321 | 0.138 | SCL3/4 |
| 1778 | 61198 | p0014r04c24 | R0045 H12 | 2.3 | 0.321 | 0.14 | SCL3/4 |
| 1779 | 61201 | p0014r06c22 | R0046 D11 | 2.43 | 0.269 | 0.111 | SCL3/4 |
| 1780 | 61202 | p0014r06c08 | R0046 D4 | 2.57 | 0.346 | 0.135 | SCL3/4 |
| 1781 | 61204 | p0014r07c07 | R0046 E4 | 4.27 | 0.516 | 0.121 | SCL3/4 |
| 1782 | 61206 | p0014r07c12 | R0046 F6 | 2.18 | 0.364 | 0.167 | SCL3/4 |
| 1783 | 61210 | p0015r09c02 | R0051 B1 | 2.43 | 0.463 | 0.19 | SCL3/4 |
| 1784 | 61212 | p0015r10c15 | R0051 C8 | 2.64 | 0.406 | 0.154 | SCL3/4 |
| 1785 | 61216 | p0015r11c16 | R0051 F8 | 2.28 | 0.278 | 0.122 | SCL3/4 |
| 1786 | 61225 | p0015r14c12 | R0052 D6 | 2.25 | 0.25 | 0.111 | SCL3/4 |
| 1787 | 61226 | p0015r14c14 | R0052 D7 | 2.54 | 0.3 | 0.118 | SCL3/4 |
| 1788 | 61227 | p0015r16c18 | R0052 H9 | 2.06 | 0.312 | 0.151 | SCL3/4 |

[1275] The ratio of signal 1 to signal 2 in the table above provides a measure of the level of expression of the identified sequences in tumor versus normal tissues. For example, for SEQ ID NO: 1669, the tumor-specific signal was 3.09 times that of the signal for the normal tissues tested; for SEQ ID NO: 1670, the tumor-specific signal was 2.31 times that of the signal for normal tissues, etc.

### EXAMPLE 5

### Real-Time PCR Analyses of Lung Tumor Sequences

[1276] Real-time PCR was performed on a subset of the lung tumor sequences disclosed herein in order to further evaluate their expression profiles in various tumor and normal tissues. Briefly, quantitation of PCR product relies on the few cycles where the amount of DNA amplifies logarithmically from barely above the background to the plateau. Using continuous fluorescence monitoring, the threshold cycle number where DNA amplifies logarithmically is easily determined in each PCR reaction. There are two fluorescence detecting systems. One is based upon a double-strand DNA specific binding dye SYBR green I dye. The other uses TaqMan probe containing a Reporter dye at the 5′ end (FAM) and a Quencher dye at the 3′ end (TAMRA) (Perkin ElmerlApplied Biosystems Division, Foster City, Calif.). Target-specific PCR amplification results in cleavage and release of the Reporter dye from the Quencher-containing probe by the nuclease activity of AmpliTaq Gold™ (Perkin Elmer/Applied Biosystems Division, Foster City, Calif.). Thus, fluorescence signal generated from released reporter dye is proportional to the amount of PCR product. Both detection methods have been found to generate comparable results To compare the relative level of gene expression in multiple tissue samples, a panel of cDNAs is constructed using RNA from tissues and/or cell lines, and real-time PCR is performed using gene specific primers to quantify the copy number in each cDNA sample. Each cDNA sample is generally performed in duplicate and each reaction repeated in duplicated plates. The final Real-time PCR result is typically reported as an average of copy number of a gene of interest normalized against internal actin number in each cDNA sample. Real-time PCR reactions may be performed on a GeneAmp 5700 Detector using SYBR Green I dye or an ABI PRISM 7700 Detector using the TaqMan probe (Perkin Elmer/Applied Biosystems Division, Foster City, Calif.).

[1277] Results obtained from real-time PCR analysis of a number of lung tumor-specific sequences disclosed herein are summarized in the table below. In addition, extended cDNA sequences for many of these clones were obtained by searching public sequence databases. The extended sequences, and the proteins encoded by those sequences, are identified by SEQ ID NO: in Table 11 below.

TABLE 11

| | | | | | Extended | Encoded |
|---|---|---|---|---|---|---|
| | Clone | Clone | SEQ ID | | cDNA | Polypeptide |
| Library | Name | No. | NO: | Real-Time PCR Results | Sequence | Sequence |
| SQL1 | L972P | 47988 | 1789 | Overexpressed in 1/7 lung squamous | | |
| | | | | tumor, 1/3 HN squamous tumor. Low or | | |
| | | | | no expression in normal tissues. | | |
| SQL1 | L979P | 48005 | 1790 | Over-expressed in 2/7 squamous lung | 1791 | 1806 |
| | | | | tumors, 1/3 HN squamous tumors, 1/2 | | |
| | | | | adeno lung tumors. Low or no | | |
| | | | | expression in normal tissues. | | |
| SQL1 | L970P | 49853 | 1269 | Highly overexpressed in 1/7 lung | | |
| | | | | squamous tumors and 1/3 HN | | |
| | | | | squamous tumor. Low or no expression | | |
| | | | | in normal tissues. | | |
| SQL1 | L981P | 49865 | 1272 | Over-expressed in 1/6 squamous lung | | |
| | | | | and 1/3 HN squamous tumors. Low or | | |
| | | | | no expression in normal tissues. | | |
| SQL1 | L980P | 49826 | 1279 | Over-expressed in 3/7 squamous lung | 1792 | 1807 |
| | | | | tumors, 1/3 HN squamous tumors, 1/2 | | |
| | | | | adeno lung tumors. Low or no | | |
| | | | | expression in normal tissues. | | |
| SCL1 | L973P | 20631 | 117 | Over-expressed in atypical carcinoid | 1793 | 1808 |
| | | | | METs and adenocarcinoma. Expression | | |
| | | | | in several normal tissues. | | |
| SCL1 | L974P | 20661 | 128 | Over-expressed in primary small cell, | 1794 | 1809 |
| | | | | squamous and adenocarcinomas. | | |
| | | | | Expression observed in several normal | | |
| | | | | tissues. | | |
| SCL1 | L996P | 50430 | 1442 | Over-expressed in 2/2 Primary Small | 1795 | 1810 |
| | | | | Cell, 6/6 Small Cell Cell Lines, 1/1 | | |
| | | | | Atypical Carc. METs, 1/1 Adeno, 1/1 | | |
| | | | | Squamous. Very low or no expression in | | |
| | | | | normal tissues. | | |
| SCL3 | L977P | 26961 | 288 | Over-expressed in 1/2 Primary Small | 1796 | 1811 |
| | | | | Cell, 1/6 Small Cell-Cell Line, and 1/1 | | |
| | | | | Carcinoid Mets. Very low or no | | |
| | | | | expression in normal tissues. | | |
| SCL2 | L978P | 24928 | 1339 | Over-expressed in 2/2 primary small | 1797 | 1812 |
| | | | | cell, 3/6 small cell-cell lines, 1/1 | | |
| | | | | carcinoid mets., adeno and squamous | | |
| | | | | tumor pools; Low or no expression in | | |
| | | | | normal tissues. | | |
| SCL3/4 | L984P | 50507 | 1446 | Highly expressed in 1/2 primary small | 1798 | 1813 |
| | | | | cell tumors and 4/6 small cell tumor cell | | |
| | | | | lines. Low or no expression in normal | | |
| | | | | tissues. | | |
| SCL3/4 | L580S | 50536 | 1449 | Over-expressed in select small cell and | | |
| | | | | squamous tumors. Some expression | | |
| | | | | observed normal brain, bronchiol, soft | | |
| | | | | palate and trachea. | | |
| SCL3/4 | L988P | 50645 | 1531 | Over-expressed in 1/2 Primary Small | 1799 | 1814 |
| | | | | Cell, 1/2 Primary Small Cell, 6/6 Small | | |
| | | | | Cell-Cell Lines, 1/1 Carcinoid Mets., | | |
| | | | | Adeno & Squamous Tumor pool. | | |
| | | | | Expressed in some normal tissues | | |
| | | | | (brain, adrenal gland, salivary gland, | | |
| | | | | trachea, thymus). | | |
| SCL3/4 | L1423P | 50625 | 1533 | Over-expressed in 1/2 primary small | 1800 | 1815 |
| | | | | cell, 5/6 small cell-cell lines, 1/1 | | |
| | | | | carcinoid mets. Also expressed in | | |
| | | | | normal brain and pituitary gland. | | |
| SCL3/4 | L986P | 50483 | 1490 | Over-expressed in 1/2 primary small | | |
| | | | | cell, 5/6 small cell-cell lines, 1/1 | | |
| | | | | carcinoid mets., adeno and squamous | | |
| | | | | tumor pool. Expressed in normal brain, | | |
| | | | | pituitary gland and spinal cord. | | |
| SCL3/4 | L987P | 50560 | 1527 | Over-expression in 1/2 Primary Small | 1801 | 1816-1818 |
| | | | | Cell, 6/6 Small Cell-Cell Lines, 1/1 | | |
| | | | | Carcinoid Mets. Expression in normal | | |
| | | | | pituitary and adrenal glands. | | |
| SCL3/4 | L1424P | 50639 | 1547 | Over-expression in 1/2 Primary Small | | |
| | | | | Cell and 1/1 Carcinoid Mets. Low or no | | |
| | | | | expression in normal tissues. | | |
| MLN1 | L997P | 26749 | 730 | Over-expression in 1/1 atypical | | |
| | | | | carcinoid METs. No expression in | | |
| | | | | normal tissues. | | |
| MLN1 | L999P | 26752 | 733 | Over-expressed in 2/2 Primary Small | | |
| | | | | Cell, 6/6 Small Cell Cell Lines, 1/1 | | |
| | | | | Atypical Carc. METs. Expression in | | |
| | | | | several normal tissues. | | |
| MLN1 | L1400P | 26529 | 405 | Over-expressed in 2/6 Small Cell Cell | | |
| | | | | Lines and 2/2 Primary Small Cell. | | |
| | | | | Moderate to low expression in several | | |
| | | | | normal tissues. | | |
| MLN1 | L998P | 27699 | 468 | Over-expression in 1/1 Atypical | 1802 | 1819 |
| | | | | Carcinoid METs. Low expression in | | |
| | | | | normal tissues. | | |
| LAP1 | L1425P | 59303 | 949 | Over-expressed in 4/7 squamous | 1803 | 1820 |
| | | | | tumors, 1/2 adenocarcinoma tumors | | |
| | | | | and in a pool of six small cell lung | | |
| | | | | carcinomas. Moderate to high | | |
| | | | | expression observed in normal brain, | | |
| | | | | kidney and skeletal muscle. | | |
| LAP1 | L1426P | 59314 | 1156 | Highly overexpressed in one lung | 1804 | 1821 |
| | | | | squamous tumor and one HN | | |
| | | | | squamous tumor. Very low or no | | |
| | | | | expression observed in normal tissues. | | |
| LAP1 | L1427P | 59298 | 921 | Highly over-expressed in 3/12 | 1805 | 1822 |
| | | | | adenocarcinoma tumors. Very low or no | | |
| | | | | expression in normal tissues. | | |
| LAP1 | L1428P | 59316 | 1180 | Over-expressed in 4/12 | | |
| | | | | adenocarcinoma tumors and lower level | | |
| | | | | expression in several other | | |
| | | | | adenocarcinoma tumors. Very low or no | | |
| | | | | expression in normal tissues. | | |

### EXAMPLE 6

### Identification of CD4 Immunogenic T Cell Epitopes Derived from Lung Tumor Antigens

[1278] CD4 T cell lines specific for the antigen L548S (SEQ ID NO: 789) were generated as follows.

[1279] A series of overlapping 20-mer peptides were synthesized that spanned the entire L548S sequence (SEQ ID NO: 1834-1856, respectively). For priming, peptides were combined into pools of 4-5 peptides and cultured at 2 micrograms/ml with dendritic cells and purified CD4+ T cells in 96 well U-bottomed plates. One hundred cultures were generated for each peptide pool. Cultures were restimulated weekly with fresh dendritic cells loaded with peptide pools. Following a total of 3 stimulation cycles, cells were rested for an additional week and tested for specificity to antigen presenting cells (APC) pulsed with peptide pools using interferon-gamma ELISA and proliferation assays. For these assays, adherent monocytes loaded with either the relevant peptide pool, recombinant L548S or an irrelevant peptide were used as antigen presenting cells (APC). As shown in Table 12, below, a number of CD4 T cell lines demonstrated reactivity with the priming peptides as well as recombinant L548S protein. These lines were further expanded to be tested for recognition of individual peptides from the pools, as well as for recognition of recombinant L548S.

[1280] The dominant reactivity of these lines appeared to be with peptide 21 (SEQ ID NO: 1854), which corresponds to amino acids 161-180 of L548S.

TABLE 12

| Stimulation | | | | | | |
|---|---|---|---|---|---|---|
| | Positive | Proliferation (CPM) | | | Stimulation Index | |
| Peptides | cell lines | No antigen | Peptides | L548S | Peptides | L548S |
| p1-5 | B1 | 700 | 14891 | 8791 | 21 | 13 |
| | B2 | 1135 | 48724 | 53944 | 42 | 47 |
| | G2 | 1227 | 7609 | 3193 | 6 | 3 |
| p6-10 | | | | | | |
| p11-15 | E2 | 8315 | 33723 | 13391 | 4 | 2 |
| | E4 | 22097 | 100040 | 44171 | 5 | 2 |
| p16-19 | | | | | | |
| p20-23 | E3 | 3937 | 45367 | 15524 | 11 | 4 |
| | F4 | 2648 | 130947 | 12927 | 49 | 5 |

### EXAMPLE 7

### Detection of Antibodies against Lung Tumor Antigens in Patient Sera

[1281] Antibodies specific for the lung tumor antigens L548S (SEQ ID NO: 789), and L552S (SEQ ID NO: 809) were shown to be present in effusion fluid or sera of lung cancer patients but not in normal donors. More specifically, the presence of antibodies against L548S, L551S (SEQ ID NO: 827) and L552S in effusion fluid obtained from lung cancer patients and in sera from normal donors was examined by ELISA using recombinant proteins and HRP-conjugated anti-human Ig. Briefly, each protein (100 ng) was coated in a 96-well plate at pH 9.5. In parallel, BSA (bovine serum albumin) was also coated as a control protein. The signals ([S], absorbance measured at 405 nm) against BSA ([N]) were determined. The results of these studies are shown in Table 13, wherein − represents [S]/[N]<2; +/− represents [S]/[N]>2; ++ represents [S]/[N]>3; and +++ represents [S]/[N]>5.

TABLE 13
Detection of Antibodies against Lung Tumor Antigens

| | L548S | L551S | L552S |
|---|---|---|---|
| Effusion fluid | | | |
| #1 | +/− | − | − |
| #2 | − | − | − |
| #3 | − | − | +++ |
| #4 | − | − | − |
| #5 | +/− | − | − |
| #7 | − | − | − |
| #8 | − | − | +/− |
| #10 | − | − | +/− |
| #11 | − | − | − |
| #12 | = | − | +/− |
| #13 | − | − | − |
| #14 | +/− | − | +/− |
| #15 | − | − | − |
| #17 | − | − | ++ |
| #18 | − | − | − |
| #19 | − | − | ++ |
| #20 | − | − | − |
| Normal sera | | | |
| #21 | − | − | − |
| #22 | − | − | − |
| #23 | − | − | − |
| #24 | − | − | − |
| #25 | − | − | − |

[1282] Using Western blot analyses, antibodies against L552S were found to present in 1 out of 4 samples of effusion fluid from lung cancer patients, with no L552S antibodies being detected in the three samples of normal sera tested.

### EXAMPLE 8

### Fusion Proteins of Lung Tumor Antigens

[1283] Fusion proteins of full-length Ra12 with either L801P ORF4 (SEQ ID NO: 1670) or L801P ORF5 (SEQ ID NO: 1671) were prepared and expressed as single recombinant proteins in E. coli as follows.

[1284] The cDNA for ORF4 of L801P was obtained by PCR with a cDNA for the full length L801P and the primers of SEQ ID NO: 1857 and 1858. The cDNA for ORF5 of L801P was obtained by PCR with a cDNA for the full length L801P and the primers of SEQ ID NO: 1859 and 1860. The PCR products with expected size were recovered from agarose gel, digested with restriction enzymes EcoRL and XhoI, and cloned into the corresponding sites in the expression vector pCRX1 for subsequent expression in E. coli. For the fusion of Ra12 with ORF4, the best expression was obtained in HMS174(DE3)pLysS in 2× YS media, with recombinant protein being induced using IPTG at 37° C. for approximately 3 hours. For the fusion of Ra12 with ORF5, the best expression was obtained in HMS174(DE3)pLysS in 2× YS media, again with recombinant protein being induced using IPTG at 37° C. for approximately 3 hours. The plasmids used for the fusion protein production were confirmed by DNA sequencing. The determined cDNA sequences for the ORF4 and ORF5 fusions are provided in SEQ ID NO: 1861 and 1862, respectively, with the corresponding amino acid sequences being provided in SEQ ID NO: 1863 and 1864, respectively.

### EXAMPLE 9

### Cloning of cDNA Encoding Full-Length L984P

[1285] The example illustrates the isolation of cDNA sequences encoding L984P by PCR amplication from four separate cDNA sources. Briefly, an earlier isolated cDNA sequence of clone L984P was identified as having homolgy to a DNA sequence that encodes human achaete-scute homolog 1 (ASHI). Gene specific primers were made using the sequence information present in the public domain for ASHI (genbank acc. NM-004316). Using these gene specific primers in PCR amplification, L984P was cloned from four separate cDNA sources. The four cDNA sources were a small cell lung carcinoma primary tumor sample (RNA Id. 573A), a METs neuroendocrine atypical carcinoid sample (RNA Id. 512A), and two small cell lung carcinoma cell lines (cell-line Id. NCI H128 and DMS79). The determined cDNA sequences for these four clones are provided in SEQ ID NO:1865-1868, respectively. The coding region of the cDNA contains a repeat of the triplet CAG that exhibits polymorphism in the human genomic DNA. This polymorphism can be observed in L984P cloned from the four different sources as well as from the cDNA of ASHI and that derived from the human chromosome 4. The cDNA of ASHI (genbank Acc. NM-006688) deposited in the genbank database contains 14 copies of the triple CAG, whereas the cDNA sequence derived from the human chromosome 4 sequence (genbank Acc. XM 006688) contains 12 copies of the triplet. The cDNA cloned from 573A and 512A both contain 12 copies of the CAG triplet. The cDNA cloned from the small cell lung carcinoma cell line DMS79 contains 13 copies of the triplet CAG, while the cDNA cloned from the small cell lung carcinoma cell line NCI H128 contains only 10 copies of the triplet CAG. As the polymorphism is present in the coding region, this results in polymorphisms in the protein sequences as well (see, SEQ ID NO: 1869-1872).

### EXAMPLE 10

### Cloning of cDNA Encoding Full-Length L985P

[1286] As previously disclosed in Example 1C, a search of the public databases using the sequence for contig 139 (SEQ ID NO:1467, also known as L985P) as the query was conducted and showed that this sequence had homology to the cDNA (SEQ ID NO:1676) encoding the cell surface immunomodulator-2 (CSIMM-2, sequence obtained from the Geneseq database). The full-length sequence of the clone was obtained by screening a small cell lung carcinoma cDNA library with a radioactively labeled probe of the original cloned sequence (SEQ ID NO:1467). Approximately 500,000 clones from the cDNA library were screened and 2 independent clones containing cDNA insert of 1.35 kb were isolated. The full-length cDNA sequence is provided in SEQ ID NO:1873 and the encoded amino acid sequence is provided in SEQ ID NO: 1874. Surprisingly, an alignment of the isolated full-length cDNA sequence of L985P (SEQ ID NO:1873) with the Geneseq database sequence for CSIMM-2 showed that L985P differs from the GeneSeq database sequence by one nucleotide. This nucleotide difference results in a change of one amino acid residue at position 119 (G to E) of SEQ ID NO:1874.

[1287] The predicted protein structure and sequence of L985P indicates that it is a member of the tetraspanin family (TM4SF) as evidence by its homology to other TM4SF family members. The TM4SF family consists of approximately 20 different members. Tetraspanins are cell surface expressed proteins with four transmembrane spanning domains. The two extracellular domains of the tetraspanins are subject to post-translational modifications, including glycosyation and acylation. Tetraspanin family members exhibit 20-30% overall homology, which is confined mostly to the transmembrane domains. Similar to other TM4SF family members, L985P is predicted to consist of four transmembrane regions, two extracellular domains, and three intracellular domains which include the N- and C-terminal regions of the protein. Several of the tetraspanins demonstrate a broad tissue distribution, including CD9, CD63, CD81 and CD82, whereas others are highly restricted to particular cell types, such as CD37 on B cells or CD53 on lymphoid and myeloid cells. As also mentioned in Example 1C, L985P is over-expressed in small cell lung carcinoma as determined by quantitative real-time PCR. Low level expression is seen in some normal tissues including lung, pituitary gland, stomach, colon, and trachea, while expression in other normal tissues checked was negligible or undetectable (see, Example 1C).

[1288] Tetraspanins are associated with cancer and may play a direct role in controlling tumor progression. Although CD9 expression will positively influence B cell migration, CD9 overexpression suppresses motility and metastasis in carcinoma cells and there is an inverse correlation with metastasis in melanoma. However, CD9 is also expressed on 90% of non-T cell acute lymphoblastic leukemia cells and 50% of chronic lymphocytic leukemias. A recent study using RT-PCR analysis of tetraspanin expression in Burkitt lymphoma cell lines found that 90% of the lines express CD53, CD81, CD63, CD82 and SAS at high levels. CD151/PETA3 is an effector of metastasis and cell migration and Mabs that block this activity have been developed. Similarly, overexpressioin of the tetraspanin CO-029/D6.1 will increase the metastatic potential of cell lines. The tetraspanins control a diverse set of biological functions that can be regulated by Mabs. The functions of the tetraspanins, in general, can be grouped into actions that affect cell activation and proliferation, as well as adhesion and motility. These functions tend to be carried out by their association with integrins. The functional activity of tetraspanins can be modulated with Mabs in such a way as to control cell proliferation. For example, CD81/TAPA-1 is associated with B cell activation and increased proliferation, an activity that can be blocked with Mabs. Mabs with anti-proliferative activity have been generated to the tetraspanin family member CO-029/D6.1. Thus, by comparison, features that make Her2 and CD20 effective therapeutic Mab targets (i.e. control of proliferation) may make tetraspanins good targets for this type of therapeutic intervention. As mentioned above, L985P is specifically over-expressed in small cell lung carcinoma. Thus, L985P represents an attractive target for therapeutic antibody intervention in small cell lung carcinoma. To facilitate the generation, purification, and evaluation of Mab against L985P, Mabs against the entire deduced amino acid sequence of the L985P protein, peptides derived from L985P or chemically produced (synthetic) L985P peptides will be used. Also, one can use Mabs raised against chimeric forms of L985P protein molecule fused to Ra12 protein either the long form (Ra12- which is the first 128 amino acids of Ra12) and/or the short form (Ra12S) or fused to a polyhistidine peptide or any combination of these molecules. Provided are the predicted cDNA and amino acid sequences for the his-tagged L985P-Ra12 fusion molecules: Ra12-L985P_cDNA (SEQ ID NO:1875), Ra12-L985P_Protein (SEQ ID NO:1876), Ra12S-L985P_cDNA (SEQ ID NO: 1877) and Ra12S-L985P_Protein (SEQ ID NO: 1878); and the L985P derived peptides: his-tagged Ra12S-L985PEx_cDNA (SEQ ID NO:1879), his-tagged Ra12S-L985PEx_Protein (SEQ ID NO:1880), L985P_Extracellular_Loop-2_cDNA (SEQ ID NO:1881) and L985P_Extracellular_Loop-2 Peptide (SEQ ID NO:1882).

### EXAMPLE 11

### Expression in E. coli of A HIS-Tagged RA12-L985P Fusion Protein

[1289] This example sets forth a specific embodiment of a fusion between Ra12 and L985P and its expression in E. coli. A his-tagged fusion protein of the long-form of Ra12 and all but the first three amino acid residues of L985P was expressed as a single recombinant protein in E. coli. The long-form of Ra12 was modified from the original sequence of amino acid residues 192-323 of MTA32A in that a punative thrombin cleavage site was replaced with a HindIII restriction site. The L985P was fused downstream of the Ra12 sequence in a pCRX1 vector. The Ra12 sequence was cloned downstream of the RBS. As a result, a his-tagged fusion protein is produced when the recombinant vector is expressed in E. coli. The sequence for the fusion of the long-form of Ra12 and L985P was confirmed by DNA sequencing. The determined cDNA sequence is provided in SEQ ID NO: 1875 as this sequence is the same as that predicted in Example 10.

### EXAMPLE 12

### Cloning of cDNA Encoding Full-Length L1428P

[1290] As previously disclosed in Example 5, real-time PCR was performed on a subset of the lung tumor sequences disclosed herein in order to further evaluate their expression profiles in various tumor and normal tissues. The results of which were provided in Table 11. One of the sequences analyzed was from clone #59316 (SEQ ID NO:1180, L1428P) and was shown to be expressed in a subset of lung adenocarcinomas.

[1291] Further studies have isolated the full-length cDNA for the cloned sequence of #59316 (SEQ ID NO:1180, L1428P) In order to determine the transcript size of the gene, a multiple tissue Northern blot was probed with the radioactively labeled original cloned sequence (SEQ ID NO: 1180). The Northern blot included about 20 ug of total RNA from lung adenocarcinoma and normal tissues samples. Visual analysis of the exposed film revealed a single transcript of approximately 6.5-7.0 kb. The full-length sequence of the clone was obtained by screening a lung adenocarcinoma primary tumor cDNA library with a radioactively labeled probe of the original cloned sequence (SEQ ID NO:1180). Approximately 500,000 clones from the cDNA library were screened and 5 independent clones containing a cDNA insert of 6.8 kb were isolated. This insert size is similar to the size estimated by Northern-blot analysis. The full-length sequence is provided in SEQ ID NO: 1883. Although no distinct ORF could be identified, seven potential ORFs can be predicted and the amino-acid sequences of these potential ORFs, designated L1428P_ORF1 to ORF7, are provided in SEQ ID NO:1884-1890, respectively. The expression of full-length L1428P was re-analyzed by real-time PCR as set forth in Example 5 on extended cDNA panels for both lung adenocarcinomas and squamous cell carcinomas. The lung adenocarcinoma extended panel real-time results again confirm the expression of L1428P in adenocarcinoma with about 40-50% of the adenocarcinoma samples showing varying levels of expression. The real-time results from the squamous cell carcinoma extended panel shows that L1428P is also expressed in lung squamous cell carcinoma. However, the expression was in fewer lung squamous cell carcinoma samples and at a lower level.

### EXAMPLE 13

### Real-Time PCR Analysis of cDNA Sequences which are Over-Expressed in Lung Tumors as Shown by Microarray

[1292] The following clones listed in Table 14 were shown previously to be over-expressed in lung tumors by microarry analysis (see, Example 2C and Example 6, Table 10). The results of this microarray analysis are summarized below in Table 14.

TABLE 14

| SEQ ID NO:. | CLONE ID #. | Ratio | Mean Signal 1 | Mean Signal 2 |
|---|---|---|---|---|
| 1383 | 50096 | 16.04 | 1.895 | 0.118 |
| | (contig 156) | | | |
| 1560 | 54454 | 2.86 | 0.2 | 0.07 |
| | (contig 234) | | | |
| 1561 | 54463 | 3.31 | 0.248 | 0.075 |
| | (contig 235) | | | |
| 1707 | 59376 | 3.23 | 0.734 | 0.227 |
| 1733 | 61090 | 2.68 | 0.364 | 0.136 |
| 1735 | 61093 | 5.7 | 0.687 | 0.121 |
| 1758 | 61137 | 8.63 | 1.463 | 0.17 |
| 1761 | 61144 | 7.02 | 0.783 | 0.112 |
| 1766 | 61159 | 4.57 | 0.831 | 0.182 |
| 1771 | 61173 | 5.57 | 1.075 | 0.193 |
| 1775 | 61185 | 5.29 | 0.962 | 0.182 |
| 1786 | 61225 | 3.41 | 0.379 | 0.111 |

[1293] Real-time PCR anaylsis was performed on these sequences on a small cell lung carcinoma panel as described in Example 7. The results obtained from the real-time PCR analysis are summarized in Table 15.

TABLE 15

| Seq. ID. No | Real-Time PCR Results |
|---|---|
| 1383 | On the SCLC panel, this gene is overexpressed in 2/2 |
| | primary small cell carcinoma and 6/6 SCLC cell lines. |
| | Some expression is also seen in normal |
| | brain, pituitary gland, spinal cord, and thymus. |
| 1560 | On the SCLC panel, this gene is overexpressed in 2/2 |
| | primary small cell carcinomas and 3/6 SCLC cell lines. |
| | Expression is also seen in normal brain and pituitary gland. |
| 1561 | On the SCLC panel, this gene is overexpressed in 2/2 |
| | primary small cell carcinomas, 6/6 SCLC cell lines, |
| | 1/1 atypical carcinoid metastases, |
| | adenocarcinoma, and squamous cell |
| | carcinoma pools. Expression is also seen in normal bone |
| | marrow, lymph node, thymus, and at lower levels in |
| | other normal tissues. |
| 1707 | On the SCLC panel, this gene is overexpressed in 1/6 |
| | SCLC cell lines and 0/2 primary small cell carcinomas. |
| | It is also expressed in normal stomach and at lower levels in |
| | normal brain, salivary gland, and trachea. |
| 1733 | On the SCLC panel, this gene is overexpressed in 2/2 |
| | primary small cell carcinomas, 6/6 SCLC cell lines, 1/1 |
| | atypical carcinoid metastases, adenocarcinoma, and |
| | squamous cell carcinoma pools. some expression is |
| | also seen in normal bone marrow, lymph node, thyms, and |
| | at lower levels in other normal tissues. |
| 1735 | On the SCLC panel, this gene is overexpressed in 2/2 |
| | primary small cell carcinomas, 5/6 SCLC cell lines, 0/1 |
| | atypical carcinoid metastases, and adenocarcinoma pool. |
| | Lower level expression is also seen in normal bone |
| | marrow and skeletal muscle. |
| 1758 | On the SCLC panel, this gene is overexpressed in 2/2 |
| | primary small cell carcinomas, 6/6 SCLC cell lines, 0/1 |
| | atypical carcinoid metastases, adenocarcinoma, and |
| | squamous cell carcinoma pools. Some expression is also |
| | seen in normal bone marrow, thyroid gland, and trachea. |
| 1761 | On the SCLC panel, this gene is overexpressed in 2/2 |
| | primary small cell carcinomas, 6/6 SCLC cell lines, 0/1 |
| | atypical carcinoid metastases, adenocarcinoma, and |
| | squamous cell carcinoma pools. Expression is also |
| | seen in normal bone marrow. |
| 1766 | On the SCLC panel, this gene is overexpressed in 2/2 |
| | primary small cell carcinomas, 6/6 SCLC cell lines, |
| | and 0/1 atypical carcinoid metastases. Expression is also |
| | seen in normal pituitary gland, adrenal gland, bone |
| | marrow, thymus, salivary gland, and at lower levels in a |
| | variety of other normal tissues. |
| 1771 | On the SCLC panel, this gene is overexpressed in 2/2 |
| | primary small cell carcinomas, 6/6 SCLC cell lines, |
| | 0/1 atypical carcinoid metastases, and squamous |
| | cell carcinoma pools. Some expression is also seen in |
| | normal pituitary gland. |
| 1775 | On the SCLC panel, this gene is overexpressed in 2/2 |
| | primary small cell carcinomas, adenocarcinoma, and |
| | squamous cell carcinoma pools. No expression is observed |
| | in the SCLC cell lines and the atypical carcinoid |
| | metastases. Some normal tissue expression is seen in |
| | liver, stomach, thyroid gland, lymph node, and thymus. |
| 1776 | On the SCLC panel, this gene is overexpressed in 2/2 |
| | primary small cell carcinomas, 6/6 SCLC cell lines, |
| | adenocarcinoma, and squamous cell carcinoma pools. |
| | Some expression is also seen in normal bone marrow, |
| | pituitary gland, stomach, trachea, and thymus. |

[1294] These sequences were then compared to known sequences in the available databases (Genbank, GeneSeq, huEST, etc.). Nine of these sequences showed some degree of similarity to known sequences in the available databases. The results of these nine hits are summarized in Table 16 along with providing sequence listing identifiers for the DNA sequences and the respective encoded amino acid sequences (where available) of these matches. SEQ ID NO:1561 and 1786 showed no significant similiarity to any known sequences.

TABLE 16

| | | | | Amino |
|---|---|---|---|---|
| Seq. | | | cDNA | Acid Seq. |
| ID. | | | Seq. of | Of Hit (If |
| NO: | GenBank Database Hit | GeneSeg. Hit | Hit | Known |
| 1383 | Pr22 Protein/Stathmin/ | A16376, A08801, | 1891 | 1901 |
| | Oncoprotein 18 | A01633 | | |
| 1560 | CDNA DKFZp564O163 | — | 1892 | — |
| 1561 | Novel | Human secreted | — | — |
| | | protein 5′ | | |
| | | EST. (C30107) | | |
| 1707 | SOX21 (AF107044) | Human secreted | 1893 | 1902 |
| | | protein gene | | |
| | | 7 cloone | | |
| | | HE8CV18. | | |
| | | (X27317) | | |
| 1733 | KIAA0166 gene | Human gene | 1894 | 1903 |
| | (D79988) | signature | | |
| | | HUMGS08725. | | |
| | | (T26483) | | |
| 1735 | Ubiquitin-conjugating | DNA encoding | 1895 | 1904 |
| | enzyme E2 (AF160215) | human ubiquitin- | | |
| | | like conjugating | | |
| | | protein (UBCLE). | | |
| | | (X81676) | | |
| 1758 | Pituitary tumor | Z97293, X89295, | 1896 | 1905 |
| | transforming gene | V36964, V63198, | | |
| | protein 1 (AF095287) | Z97292, C00858, | | |
| | | V88346, Z80287 | | |
| 1761 | Novel | Kidney injury | 1897 | 1906 |
| | | associated | | |
| | | molecule HW051 | | |
| | | cDNA clone. | | |
| | | (V80605) | | |
| 1766 | Cyclin-dependent kinase | Cyclin-dependent | 1898 | 1907 |
| | inhibitor p18 (CDKN2C) | kinase (CDK6) | | |
| | (AF041248) | inhibiting protein. | | |
| | | (T10925; | | |
| | | T31456) | | |
| 1771 | CDK4-inhibitor (p16- | Multiple Matches | 1899 | 1908 |
| | INK4) (L27211) | | | |
| 1775 | Monokine induced by | Monokine | 1900 | 1909 |
| | gamma interferon (MIG) | induced by | | |
| | (NM_002416) | gammer- | | |
| | | interferon. | | |
| | | (X14998; | | |
| | | Z26088) | | |
| 1776 | Novel | — | — | — |

[1295] Further studies have isolated the full-length cDNA sequence for the cloned sequence of clone #61093 (SEQ ID NO:1735, L1437P). In order to determine the transcript size of the gene, a multiple tissue Northern blot was probed with the radioactively labeled original cloned sequence (SEQ ID NO:1735). The Northern blot included about 20 ug of total RNA from small cell lung carcinoma and normal tissues samples. Visual analysis of the exposed film revealed a single transcript of approximately 1.2 kb. The full-length sequence was obtained by screening a small cell lung carcinoma tumor cDNA library with the radioactively labeled probe of the original cloned sequence (SEQ ID NO:1735). Approximately 120,000 clones from the cDNA library were screened and 2 independent clones containing a cDNA insert of 931 bases were isolated. The inserts are similar in size to that estimated by Northern Blot analysis. The full-length cDNA sequence is provided in SEQ ID NO:1910. It was discovered that there was one nucleotide difference between the full-length cDNA and a previously published sequence. However, this nucleotide change does not result in a change in the deduced amino acid sequence. The deduced amino acid sequence encoded by the full-length cDNA is the same as already provided in SEQ ID NO: 1904, and confirms earlier predictions that this cDNA encodes a known protein, ubiquitin-conjugated enzyme E2 (AF160215, SEQ ID NO:1904). SEQ ID NO:1910 (L1437P) was shown to be over-expressed in lung small cell lung carcinoma by microarray, real-time PCR and Northern Blot analysis.

### EXAMPLE 14

### Expression in E. coli of a L548S HIS Tag Fusion Protein

[1296] PCR was performed on the L548S coding region with the following primers:

[1297] Forward primer PDM-433 5′ gctaaaggtgaccccaagaaaccaaag 3′ (SEQ ID NO: 1911) Tm 60° C.

[1298] Reverse primer PDM-438 5′ ctattaactcgagggagacagataaacagtttcttta 3′ (SEQ ID NO:1912) TM 61° C.

[1299] The PCR conditions were as follows:

[1300] 10μl 10× Pfu buffer

[1301] 1.0μl 10mM dNTPs

[1302] 2.0μl 10μM each primer

[1303] 83μl sterile water

[1304] 1.5μl Pfu DNA polymerase (Stratagene, La Jolla, CA)

[1305] 50ηg DNA

[1306] 96° C. for 2 minutes, 96° C. for 20 seconds, 61° C. for 15 seconds, 72° C. for 1 minute 30 seconds with 40 cycles and then 72° C. for 4 minutes.

[1307] The PCR product was digested with XhoI restriction enzyme, gel purified and then cloned into pPDM His, a modified pET28 vector with a His tag in frame, which had been digested with Eco72I and XhoI restriction enzymes. The correct construct was confirmed by DNA sequence analysis and then transformed into BL21 CodonPlus (Stratagene, La Jolla, Calif.) and BL21 pLys S (Novagen, Madison, Wis.) cells for expression.

[1308] The amino acid sequence of expressed recombinant L548S is shown in SEQ ID NO:1913, and the DNA coding region sequence is shown in SEQ ID NO:1914.

### EXAMPLE 15

### Expression in E. coli of a L551S HIS Tag Fusion Protein

[1309] PCR was performed on the L551S coding region with the following primers:

[1310] Forward primer PDM-498 5′ gtgacgatggaggagctgcgggagatgg 3′ (SEQ ID NO: 1915) Tm 67° C.

[1311] Reverse primer PDM-499 5′ cgcctaactcgagtcactaacagctgggag 3′ (SEQ ID NO:1916) TM 66° C.

[1312] The PCR conditions were as follows:

[1313] 10μl 10× Pfu buffer

[1314] 1.0μl 10mM dNTPs

[1315] 2.0μl 10μM each primer

[1316] 83μl sterile water

[1317] 1.5μl Pfu DNA polymerase (Stratagene, La Jolla, Calif.)

[1318] 50ηg DNA

[1319] 96° C. for 2 minutes, 96° C. for 20 seconds, 66° C. for 15 seconds, 72° C. for 2 minutes 20 seconds with 40 cycles and then 72° C. for 4 minutes.

[1320] The PCR product was digested with XhoI restriction enzyme, gel purified and then cloned into pPDM His, a modified pET28 vector with a His tag in frame, which had been digested with Eco72I and XhoI restriction enzymes. The correct construct was confirmed by DNA sequence analysis and then transformed into BLR (DE3) pLys S and BLR (DE3) CodonPlus RP cells for expression.

[1321] The amino acid sequence of expressed recombinant L551S is shown in SEQ ID NO:1917, and the DNA coding region sequence is shown in SEQ ID NO:1918.

### EXAMPLE 16

### Expression in E. coli of a L552S HIS Tag Fusion Protein

[1322] PCR was performed on the L552S coding region with the following primers:

[1323] Forward primer PDM-479 5′ cggtgccacgcccatggaccttc 3′ (SEQ ID NO:1919) Tm 64° C.

[1324] Reverse primer PDM-480 5′ ctgagaattcattaaacttgtggttgctcttcacc 3′ (SEQ ID NO:1920) TM 62° C.

[1325] The PCR conditions were as follows:

[1326] 10μl 10× Pfu buffer

[1327] 1.0μl 10mM dNTPs

[1328] 2.0μl 10μM each primer

[1329] 83μl sterile water

[1330] 1.5μl Pfu DNA polymerase (Stratagene, La Jolla, CA)

[1331] 50ηg DNA

[1332] 96° C. for 2 minutes, 96° C. for 20 seconds, 63° C. for 15 seconds, 72° C. for 1 minute with 40 cycles and then 72° C. for 4 minutes.

[1333] The PCR product was digested with EcoRI restriction enzyme, gel purified and then cloned into pPDM His, a modified pET28 vector with a His tag in frame, which had been digested with Eco72I and EcoRI restriction enzymes. The correct construct was confirmed by DNA sequence analysis and then transformed into BL21 CodonPlus (Stratagene, La Jolla, Calif.) cells for expression.

[1334] The amino acid sequence of expressed recombinant L552S is shown in SEQ ID NO:1921, and the DNA coding region sequence is shown in SEQ ID NO:1922.

### EXAMPLE 17

### Cloning of cDNA Encoding Full-Length Clones #19069 and Clones #18965 or #19002

[1335] Partial sequences of two lung antigens, clones #19069 (SEQ ID NO:90) and #18965 or #19002 (both SEQ ID NO:15), were previously provided. These partial sequences were used as a query to predict the full-length cDNA sequences for the isolated cloned sequenced by searching the publicly available databases. The predicted full-length cDNA sequence for the isolated cloned sequence of SEQ ID NO:90 is provided in SEQ ID NO:1923. The predicted full-length cDNA sequence for the isolated cloned sequence of SEQ ID NO: 15 is provided in SEQ ID NO: 1924. The deduced amino acid sequences of the two antigens are provided in SEQ ID NO:1925 and 1926, respectively These sequences were then compared to known sequences in the GeneSeq database. Both sequences showed some degree of similarity to known sequences in the GeneSeq database. SEQ ID NO: 1923 shows similarity to a lipophasphatic acid acyltransferase (GeneSeq Z25000 and Z65038) and SEQ ID NO:1924 shows similarity to a zinc/iron regulated transporter-like protein (Geneseq Z38333 and A14995).

[1336] From the foregoing it will be appreciated that, although specific embodiments of the invention have been described herein for purposes of illustration, various modifications may be made without deviating from the spirit and scope of the invention. Accordingly, the invention is not limited except as by the appended claims.

The application's sequence listing, which the Patent Office published only in electronic form, follows.

SEQUENCE LISTING (1926 sequences)

SEQ ID NO: 1 - DNA, 527 bp, Homo sapien
ccaccagtccacaaatgtgactggtaagggatctagtaacagaggatggagttgggcagaatattatcctggatgatatgcacccagcactagaatacacctttcattagaatgaagagaacagacaaagccctcagaaaagatacaaaggcagagacattgattagaacattatctcataacagaggtggggccattacccaccattattgtaaaataactgtaactaaccaaaacacatacaggcttctttaatggagttaataaaactatggcacattgggaatcaggggcagaggtactgttcccagacggaaaactgggataaagggagccatgctgacagggccttattccagtctaggttgttagaaaggagccctagcccagaaatgacagcaaatagccataatcattatgtggggctgaaccagaggaagccaggctgagccaagaagctggaagtatcttgaacggctctccaaatccaaagattatccatactctttatccctccagcgatgtgt

SEQ ID NO: 2 - DNA, 490 bp, Homo sapien
ccaagagttctccactgtgaagactgaaaggacctggtgacatttcggcatcagtcctgttaccacttggaggtaacagaagcaggctcgtgtcctcctttaattctaccacactacatgactcgcaattggttctgaaattagaacgttcaccatcgtacttaaaatcttaggggcatgaagagtcagctagaacaaggaaaaagaaagtcgcaggtagtaggtaagtaggtgggcacatgaaaagccaagctgctctgtccaacaccagtgtacatgtgctttaactaaatgaactccagaggccaacagcagcagacctgctcaattcaccttccaaatcagaacaagaccaaaaagctcaggcttgagttgtcaactatgcataggttccgccagtgctgaggggtgtgaggctctagttgtgaagaagctacaagaaatcatgatgcatgtgatctgggccgcactggcatttgcagctattcag

SEQ ID NO: 3 - DNA, 464 bp, Homo sapien
ggagctgtgggctcagtcgtggggcagattgcaaagctcaagggctgcaaagttgttggagcagtagggtctgatgaaaaggttgcctaccttcaaaagcttggatttgatgtcgtctttaactacaagacggtagagtctttggaagaaaccttgaagaaagcgtctcctgatggttatgattgttattttgataatgtaggtggagagttttcaaacactgttatcggccagatgaagaaatttggaaggattgccatatgtggagccatctctacatataacagaaccggcccacttcccccaggcccacccccagagattgttatctatcaggagcttcgcatggaagcttttgtcgtctaccgctggcaaggagatgcccgccaaaaagctctgaaggacttgctgaaatgggtcttagagtttaaatttcagcttccctactttgtaattgactgact

SEQ ID NO: 4 - DNA, 510 bp, Homo sapien
ccttatcacactgtaagtggtccaagcccatagggatgctctttttggttcctggaatttccagttggatgtgacagagatctttcagtataggtctaagtcaagagtagcctctgggttgaggtgggctgggagattaacatcttacctggggtccttcagataaacctgttggtttttcctgtctcatacaggcccatcttaagttttgatgttgaattaaaactacttctacccccttagttataaaaaaggccacaaggagcatttatgtggatatctggaagtgagatagttattccattcccaggaaaagaaaaataaagctaagttacaaaactaaatctatatgcaataaagttattatatactgctttgtttaagcagagtcctctggaatttatgtacagtacattagttttcagctatttatattccacaagttagaccttaagattctctggttttaagacaattgttaaagatacttctaaagctctgagcagttca

SEQ ID NO: 5 - DNA, 452 bp, Homo sapien
acagcgcctcacgcacctgagccccgaggagaaggcgctgaggaggaaactgaaaaacagagtagcagctcagactgccagagatcgaaagaaggctcgaatgagtgagctggaacagcaagtggtagatttagaagaagagaaccaaaaacttttgctagaaaatcagcttttacgagagaaaactcatggccttgtagttgagaaccaggagttaagacagcgcttggggatggatgccctggttgctgaagaggaggcggaagccaaggtaaatcatctcctttatttggtgcctcatgtgagtactggttccaagtgacatgacccagcgattatgtttacagtctggacttctgatcaagagcgttcttgaaattttccttcagttttaagacattttcatgcaggcagagtgttcttcccctaaaggcacttgacactcatttttt

SEQ ID NO: 6 - DNA, 336 bp, Homo sapien
tatagagtgctgacatctgacattgagaaattcatgcctattgtttatactcccactgtgggtctggcttgccaacaatatagtttggtgtttcggaagccaagaggtctctttattactatccacgatcgagggcatattgcttcagttctcaatgcatggccagaagatgtcatcaaggccattgtggtgactgatggagagcgtattcttggcttgggagaccttggctgtaatggaatgggcatccctgtgggtaaattggctctatatacagcttgcggagggatgaatcctcaagaatgtctgcctgtcattctggatgtgggaaccgaa

SEQ ID NO: 7 - DNA, 376 bp, Homo sapien
ctgtgggaaacctcattgttctgtacaaagtactagctaaaccagaaaggtgattccaggaggagttagccaaacaacaacaaaaacaaaaaatgtgctgttcaagttttcagctttaagatatctttggataatgttatttctattttttattttttttcattagaagttaccaaattaagatggtaagacctctgagaccaaaattttgtcccatctctaccccctcacaactgcttacagaatggatcatgtcccccttatgttgaggtgaccacttaattgctttcctgcctccttgaaagaaagaaagaaagaagactgtgtttttgccactgatttagccatgtgaaactcatctcattacccttttctg

SEQ ID NO: 8 - DNA, 406 bp, Homo sapien
ggtagggagcaattctattatttggcattgcatggctgggttgaattaaaacagggagtgagaacaggtgagtctagaagtccaactctgaaaaggaccactgtacatttgaacacacggctgtgttaaagatgctgctaatgtcagtcactgggtgcactaaaggatctcttattttatgtaaaacgttgggattgacaagatagatctgatactctgttaagttaccctctgaagctacttcttgtgaaatactaatgacagcatcatcctgccaagcgaaagaggcaggcataagcaaggacaaattaaaagggggtaagagccttatcatgatgaggagtcttgttttgacatcttgggaaaagctgtccatagtgtgaagtcgtcaatttctcaccatggt

SEQ ID NO: 9 - DNA, 330 bp, Homo sapien
actactaccaagagctgcagagagacatttctgaaatgtttttgcagatttataaacaagggggttttctgggcctctccaatattaagttcaggccaggatctgtggtggtacaattgactctggccttccgagaaggtaccatcaatgtccacgacgtggagacacagttcaatcagtataaaacggaagcagcctctcgatataacctgacgatctcagacgtcagcgtgagtgatgtgccatttcctttctctgcccagtctggggctggggtgccaggctggggcatcgcgctgctggtgctggtctgtgttctggttgcgctgg

SEQ ID NO: 10 - DNA, 449 bp, Homo sapien
ctgacggctttgctgtcccagagccgcctaaacgcaagaaaagtcgatgggacagttagaggggatgtgctaaagcgtgaaatcagttgtccttaatttttagaaagattttggtaactaggtgtctcagggctgggttggggtccaaagtgtaaggaccccctgcccttagtggagagctggagcttggagacattaccccttcatcagaaggaattttcggatgttttcttgggaagctgttttggtccttggaagcagtgagagctgggaagcttcttttggctctaggtgagttgtcatgcgggtaagttgaggttatcttgggataaagggtcttctagggcacaaaactcactctaggtttatattgtatgtagcttatattttttactaaggtgtcaccttataagcatctataaattgagttctttttcttagttgtatgg

SEQ ID NO: 11 - DNA, 472 bp, Homo sapien
cctcgatgcatgctgctctacctctcatcagcccacagtctgacacgaggtcatctttggtctgtggtgaggtatggatgtctgcagtctacacaacagccctgcagaacgggcctggacaacccttgggggataagacagccacacatggctcaggctgttaggtgtccactgtcacagtccaaagagaaaggtacggcctccaagggggcagcttaagccaacatgtaagacttgggcacgatgaaaggacgggggtccagctacgaatgtttttgttcttgatgtcaagttgccagctactggaaggcaggagcagtttcttctttttcccactctgtgctgggtacttgggagaggcgaaataaataccagactgtccactcctcagcctaaggtccttctcaagtcctgcacactcagcacttgctctttaacgtggcatatgttcccccatcttcccctggtaatg

SEQ ID NO: 12 - DNA, 371 bp, Homo sapien
ttttttttttttttttttttttttggaratttgkcacattttattcagwatttctgctgcactgccagcctagggatgcacttgattcccaagaaatgcaactgtcctattcgcaragccgtccacaggtacctaccccctggactgcagcaactttattaccttaactagcacaraacagaggttgatttaaactccttacactcacttctcaratcaatgaatgggcaaaraaacmcctcatggctctgggaaggcatgctgaracccgtttttgcaagtcctgaggaatggaaraatatagctgccaggtatcccaagtctagggcagggagggkagtatcggcatcactttcactgcattctgttgg

SEQ ID NO: 13 - DNA, 493 bp, Homo sapien
  misc_feature (1)...(493): n = A,T,C or G
ccagtccaacctgctcctcattattgtataaatgagcagaatcaatatggcggaagccagctycaattgccaatttggtggcctctaaagctttacttttaggaacctctgcaggcgcataggtgccaaatcccaggacaggcatgaagtgaccatcattcagcttcacacactgatatttcgaatccatttctgtcnnnnnnnnnnnnnnnnnnnnnnnnnnnnnnnnnnnnnnnnnnccaacctgctcctcattattgtaaacatgtgcagaatcaatatggcggaacccagcttctattgctaattttgtgacctccaaagctttacttctcggaaccttggttcttccgagcgctcagcaatcccgccgagcttctttgagacgtcctcaggtgtcctttgacgatgcgtcctccactttcacacactctagcattccttcactggggtcttcattgccccacattgggcagccaggaatgttggggtg

SEQ ID NO: 14 - DNA, 540 bp, Homo sapien
ccagatggtccataatatgtcaccgagcaggtgaatggcatttgtatgtcagccttggttgtcttgtactccagggtggaagtcatggtatagagctgagtcactgggtccatttcctttttaaaattatgaccaccgctccttcaaggggatgtagcacttttccattcctgtaccatgtgatattgccatctggataactgtcttctgaaatgcagtcacccaacttttttagctgctctgtttcgagaaacagtgctttgcttacaatttcaggtttagatggttgcttgaacaccttgactattgtaggtgcctcaaacacgttgtcctcagttactagcatgcacacaaatctcttttcatcactgatccttgcattactgatagacaaagtgtagttttctgagaggttcaatctgtctttgtattctggtacatcgtcgtactgcacacttttctttgtagaggatctgaaggcaataaatactggggagccatcgggcttttcatatttccatttgcccaaacatgagattc

SEQ ID NO: 15 - DNA, 421 bp, Homo sapien
tacccacctccagcctcccatgtgagcctgtccttatgtatagtgtccaacctctgattctagcagtcaagtgtcttccccaatcctaatgtcccctgatatgtctctagcgacttgaccatctcttgttccttgggactggggccagcctcttgtctgcccacttccctctcattagtcagatagccccaaaggctctatctttagctcccagagaactttttggtcctcagtatttcccttcccctttccttcctattccccacaactgggggagggaagggagaacaggggcacctgatcatcaatctcccctgcccctctcttgaagccccctagatttggatgaagagcaggccagtgagcagggcaaagcctgctaggagcagaatgaccttgaggatcctttgctcagaactgg

SEQ ID NO: 16 - DNA, 236 bp, Homo sapien
gccgtgtgtgcttttcccagtgccgaggtacctatcgctcacggccaggagcttgtcgtggctgacagcaaagagctgctctctgtgggcctgcttcatctcatccgagaggccgtacaagaagtggtccattcctttgtctgaaggagcgacaggagcatctacggttgagaagacagaaagtttggcttcgtcgatgtcttgctgtgtgaattttccagacttagcccagtcga

SEQ ID NO: 17 - DNA, 424 bp, Homo sapien
ccagaaaggtgacagtggttttccagggcctcctgggcctccaggtccacctggtgaagtcattcagcctttaccaatcttgtcctccaaaaaaacgagaagacatactgaaggcatgcaagcagatgcagatgataatattcttgattactcggatggaatggaagaaatatttggttccctcaattccctgaaacaagacatcgagcatatgaaatttccaatgggtactcagaccaatccagcccgaacttgtaaagacctgcaactcagccatcctgacttcccagatggtgaatattggattgatcctaaccaaggttgctcaggagattccttcaaagtttactgtaatttcacatctggtggtgagacttgcatttatccagacaaaaaatctgagggagtaagaatttcatcatgg

SEQ ID NO: 18 - DNA, 154 bp, Homo sapien
gtcaccaactccttcagcgcctccacagggstttcggacatgacagcaaccttttctcccaggacaattgaaatttgctaaagggaaaggggaaagaaagggaaaagggagaaaaagaaacacaagagacttaaaggacaggaggaggagatgg

SEQ ID NO: 19 - DNA, 445 bp, Homo sapien
caacaaaattggtgaacacatggaagaacatggcatcaagtttataagacagttcgtaccaattaaagttgaacaaattgaagcagggacaccaggccgactcagagtagtagctcagtccaccaatagtgaggaaatcattgaaggagaatataatacggtgatgctggcaataggaagagatgcttgcacaagaaaaattggcttagaaaccgtaggggtgaagataaatgaaaagactggaaaaatacctgtcacagatgaagaacagaccaatgtgccttacatctatgccattggcgatatattggaggataaggtggagctcaccccagttgcaatccaggcaggaagattgctggctcagaggctctatgcaggttccactgtcaaagtgtgactatgaaaatgttccaaccactgtatttactcctttggaatatgg

SEQ ID NO: 20 - DNA, 211 bp, Homo sapien
gggtgccactgcctgcttgaaagcactttctgaacctacagaagttgggtattgtctgaaatcccagaggacccataagtgccggtgacaagctgtctgtcaggggagaggctccagaacctgggttcgtccccagtgagaccggaggatgatcccccaaggactgcgcagcatcagctcttggtgggcctctgccttctcttctgtttgg

SEQ ID NO: 21 - DNA, 396 bp, Homo sapien
tgcccctgtattggattgccacacggctcacattgcatgcaagtttgctgagctgaaggaaaagattgatcgccgttctggtaaaaagctggaagatggccctaaattcttgaagtctggtgatgctgccattgttgatatggttcctggcaagcccatgtgtgttgagagcttctcagactatccacctttgggtcgctttgctgttcgtgatatgagacagacagttgcggtgggtgtcatcaaagcagtggacaagaaggctgctggagctggcaaggtcaccaagtctgcccagaaagctcagaaggctaaatgaatattatccctaatacctgccaccccactcttaatcagtggtggaagaacggtctcagaactgtttgtttcaattgg

SEQ ID NO: 22 - DNA, 277 bp, Homo sapien
ggaaccatgtggccggcgcccttgatcgtgagaaaggcgatgtgggagaactccttcacgaagccggcaatctgctccccgctgtccccgtacttcactaaccagggccggcgctgcacctccatcttctggttgagggaatccacaaaccactcatcccccatgaaattgcaggccatgtctacatctccattatataataggatctgggatttctgtgagctaagcagcttcagatactgggagttcatgcttcggtagagacggcggtactgta

SEQ ID NO: 23 - DNA, 634 bp, Homo sapien
tctgaccatccatatccaatgttctcatttaaacattacccagcatcattgtttataatcagaaactctggtccttctgtctggtggcacttagagtcttttgtgccataatgcagcagtatggagggaggattttatggagaaatggggatagtcttcatgaccacaaataaataaaggaaaactaagctgcattgtgggttttgaaaaggttattatacttcttaacaattctttttttcagggacttttctagctgtatgactgttacttgaccttctttgaaaagcattcccaaaatgctctattttagatagattaacattaaccaacataattttttttagatcgagtcagcataaatttctaagtcagcctctagtcgtggttcatctctttcacctgcattttatttggtgtttgtctgaagaaaggaaagaggaaagcaaatacgaattgtactatttgtaccaaatctttgggattcattggcaaataatttcagtgtggtgtattattaaatagaaaaaaaaaattttgtttcctaggttgaaggtctaattgatacgtttgacttatgatgaccatttatgcactttcaaatgaatttgctttcaaaataaatgaagagcag

SEQ ID NO: 24 - DNA, 512 bp, Homo sapien
gcaaaacaagcctaagcaagcacaacgaagagcagaagtcagtgaaattaaaaagaggaaaaagaaaaatcataaaaatcataaaaagttatttctttgaaaagatcaatgaaatttagcaagactgacacagataaaaaggaattagacccaaatcagtgaacaggaatgaaatagaggatatcactacagaggctgcagccattgaaaggataattaggaaatcccacagataactttgtgctcataaatttgacaatgtagaggaaatatctttagttttaattagctttttattttagtttttctcaaaaactaaaacttaataaaactcaaccaagacaaaatagacaatcagaatgtaggcatacctcagagatgtggcggatttggtttcagactactgcaataaaccaaatatggcaataaaaggagtcacagaaagtggtttcccagtgtatatatataaaagttacatttactctatgaagtgcaataacattttgtctaaa

SEQ ID NO: 25 - DNA, 461 bp, Homo sapien
ctctgtttcagcacctcattgggattattgaactcattaaattctttacatgaacttgaattgttcattgaaatctctagccatttccctggttaaacaggataatctttttttttcactaaagaacattcgtggtggtttagtgatgaggttaatattcccctcttgtccacctccacattggaaaaaccacgttggactgagttttgaggagcaaagaactaatcacttgaccaaaggggccctgtatccccacaagccctgggtatttttctctcatagagagaagagggtctgtatggatacctgaaaatgtgattttatatattcttggcatccaggggagaaaaatcaaaaagcaaggaagttacagttatctccccagaaattaatgggtcatgtcaagactataggttttcatttccttctgttgcttgttagaatgatgttcttgtgggaaa

SEQ ID NO: 26 - DNA, 317 bp, Homo sapien
tgctggagtcggaactgctgcctttgtttggcggccttgtttcttaaatcagttccctcttaggatttattacactaaaaaaaaattagtttttgaaaagaaataggagaatacagaaacatgaatttcacgaggctatcatctaacagtgggggctttctacacacgtggtgccaaaatgtgtcattctgagtcaattgcaattcctctctaggagtgaaaagagataaaagataagccaagaaccctggacagattcttggtgttggtgacaaagaggaaaggacctgagaatggggctggtggggagagggggg

SEQ ID NO: 27 - DNA, 250 bp, Homo sapien
taattgctgtgattattagaattctatcatgactgtattgtagtttttgctctattycagataagcmagatctaagaagttatcaaaactattctttaaaatgctaaagcaggtaactttttcttccattattttttcctcctaccactgagttttgtaatgaattccttgtgtatacaagcaatacaggtgaatactaaactgttatttttagcttcttcaaaagctattttagaaagcttcctggaaa

SEQ ID NO: 28 - DNA, 532 bp, Homo sapien
cctatatcattcatttatacagaagctgcttgctgcttagcaagttggtgggtttgattttccttggttgctttgcagacctcccttgagaggattccttctggatggagatttctttgttgctgtctcccttgccacaactctgaccaagattgcattgcgctatgtagctttggttcaggagaagaaaaagcaaaattcttttgttgctgaggctatgttgctcatggctactatcctgcatttgggaaaatcctctcttcctaagaagccaattactgatgatgatgtggatcgaatttccctgtgcctcaaggtcttgtctgaatgttcacctttaatgaatgacattttcaataaggaatgcagacagtccctttctcacatgttatctgctaaactagaagaagagaaattatcccaaaagaaagaatctgaaaagaggaatgtgacagtacagcctgatgaccccatttccttcatgcaactaactgctaagaatgaaatgaactgcaaggaagatcagtttcag

SEQ ID NO: 29 - DNA, 486 bp, Homo sapien
ctgtttttggacttaattaacywttgcaagtggaaaccaagaaataattgtagcataactctctctattgtcatgttgcttctttctgcaaatatatcttacaagttagactttaaacctttgatctcccacaccaaaagagaaaataatatttatatggaagtaattttattttagtgtttgtgatttattgtggagagcaggbgtttaaaaattttagaatttctttttaacaaaatcaaatacattgttaaggtaacaaagaataattcactatttcagcatttcaaagcaacatattctacaacttcaaagatatttgcaaaaataatacaactgttgaagttcaaatgttatggaaagaaacattagaagtatgaaaagtggtacaaaaacatgtttctttttattctcttggatatatatctatatatttaggaaaatacatatatgtatgtgtatgtatatatatgtatgaaaatatac

SEQ ID NO: 30 - DNA, 240 bp, Homo sapien
aagacctgaggaaggaaaacaaattggcttcctgctgaagaakcaaaatagacattttttaatgtctcttgaccccagttccaagttcaccctgttgcctgttcttcctcccaccttttggggttctataactgcatcccccacacatctttcaccaccaccccatacataccagctctcctgttgtgggattcaggacataggaagagttgctgaaggcacgggtgcttttgggattcg

SEQ ID NO: 31 - DNA, 233 bp, Homo sapien
ccattgatgcaggatatcggcacattgactgtgcctatgtctatcagaatgaacatgaagtgggggaagccatccaagagaagatccaagagaaggctgtgaagcgggaggacctgttcatcgtcagcaagttgtggcccactttctttgagagaccccttgtgaggaaagcctttgagaagaccctcaaggacctgaagctgagctatctggacgtctatcttattcactgg

SEQ ID NO: 32 - DNA, 233 bp, Homo sapien
gaggaatgctggactggaggcccctggagccagatggcaagagggtgacagcttcctttcctgtgtgtactctgtccagttcctttagaaaaaatggatgcccagaggactcccaaccctggcttggggtcaagaaacagccagcaagagttaggggccttagggcactgggctgttgttccattgaagccgactctggccctggcccttacttgcttctctagctctctagg

SEQ ID NO: 33 - DNA, 319 bp, Homo sapien
ctgggcctggatggtctaggatagccttactcacttgcctggcaggtgacaggctgttggctggaattgcttggttctcctccatgtggcctctccagtaggctagctcaggcttattcacatgatggcttcaggattccaaagagagtgagagtagaagctgaaagacttcttgagttcttggcctggaactgggactaggacagtgtcacttctgctaagttcttttggtcagagcaaatcacaaggctttacccagattcaagggatgagaaacagactacatgtcttgatgaggggaaccacaaagagcttgtgg

SEQ ID NO: 34 - DNA, 340 bp, Homo sapien
tacagatttaattcatgttattaactccctgccttttacctcctccctcctcccttggcacaactgccagatggatgtggctggaagtcagaggacattctcgtgggttcgtgggcctagggtacaaatgacctcagcgtgacagcaaacaggacagagaagaccaggctcttactcaggaatccaccagccaggagaatgacaatgttgaacaccggaaccctgatgatatctgtcacatttgtaaggttgatttcagagtcaggagtggagacatcggcagttgacttgggtggagcttgggtcacagttctggggctggtatagagtgggcacaagg

SEQ ID NO: 35 - DNA, 170 bp, Homo sapien
acatgggtccttcactcctcgctgagatgttgcggcagccttttcttccaatgcggttgtggcaggagaatccacggatgtaatgttttcacctttttccctgagggtgctttctgaggaaccagyccttaagaggtggggtcttggattcctgacccaggcgtccggca

SEQ ID NO: 36 - DNA, 475 bp, Homo sapien
ctgtttttggacttaattaaccattgcaagtggaaaccaagaaataattgtagcataactctctctattgkcatgttgcttctttctgcaaatatatcttagaagttagactttaaacctttgatctcccacaccaaaagagaaaataatatttatatggaagtaattttattttagtgtttgtgatttattgtggagagcaggtgtttaaaaattttagaatttctttaacaaaattctaaagagaaaataaaaaagaaatcacagtatttacagagataacagaatggcttagccatgcaaaacaaataactttggtttttccccttttactttggtttaaatgttgaccaagattcaattttttttcctgccaaataaaacttcaataaaagtttagaggcaaaataacgtattttctttttttcccataatattttatacagcatcgagtctaagaatattttatgcattt

SEQ ID NO: 37 - DNA, 246 bp, Homo sapien
ccttgagcttgggccgggcactgaggcgccccacatatgctgagagcagggggaacgcatccaggcagccaggggctaggacctcatggatcagcagcaagtccagcaggttgtagtcagcgaaggagatctggtctcccacaatgaaggtcttgcctccctggttctgggacagcagggtctcaaaaggcttcagttgcccgggcagtgccttcacatagtcatccttgcccacctcatagttgg

SEQ ID NO: 38 - DNA, 512 bp, Homo sapien
gctggaagtgaaatgcagatcagacccattgtgatgtcacagaaagatggggacaggccaaagaaaaaagtgactttcaactcttcttccatcatttttatcatcaccagtgatgaatcactgtcagttgacgacagcgacaaaaccaatgggtccaaagttgatgtaatccaagttcgtcctttgtaggaatgaagaatggcaacgaaagatggggccttaaattggatgccacttttggactttcatcataagaagtgtctggaatacccgttctatgtaatatcaacagaaccttgtggtccagcaggaaatccgaattgcccatatgctcttgggcctcaggaagaggttgaacaaaaacaaattcttttaattcaacgggtgctttacataatgaaaaaaccacttgtggcacacgatgggcatctaacatcatcatcttctaatgtgttggagattttcatttcaaatatattttttaaattactctattttccaaaacacgtaat

SEQ ID NO: 39 - DNA, 370 bp, Homo sapien
ttttatgaacaagatataaggatcaaaaaaaagggtgttgatatgtttttccaagcagagatgtactcgactctgtcctatttagccttcccatacctgacttctaatcacttttcctggtgccctyccatctccctaaccccccctcacagggatgcctcctcccaaggctccagaaactctgaccctcgcactgctggagggagcccatgaattgctggtcaatatcgctcatcctctakactccatcctgcgtgtgcttcttcctacaagagctagagaggcactgactgataaatacctgtcacctgcccctttcccagagggtgaaactccacccactcccactgcagaaatgaatcttaaatgg

SEQ ID NO: 40 - DNA, 204 bp, Homo sapien
cctgagggttttccctttaaattttcattgagttgtccatctccagcatatagggcttcaggagcagagcagaccttgtttttagtggttccatgggataaaatgggattggaggagctagaagaattcagggtctggtccaatctgccagtcttcctgaaatatcgaaaatacaccagggctgctatatcagagccaccctgg

SEQ ID NO: 41 - DNA, 447 bp, Homo sapien
caggcagcaattcgtaaagaattaaatgagtacaaaagtaatgaaatggaggtacatgcatcaagcaagcacttgacaagattccacaggccatagagattttcttctgagaagaatttgtgtttaattttttgataccaacactgaacattcatcagggaactttcctgaagttcagctcaagactaccctacctgctgtgtttgtgagaagagtaggatcacacacacaggtgcaatcttgaccacacttacctgcaagaggagtaaccagaggacacacttccttccttctttggtgtctgaggagtgtgaactgttggggtcagttaagacccaacataactctatcagaagaaaactgttgtttgcctttcaaccttgttttacagttctgcagtgtagtggaggacgggcaacgtgcatgtgcaggctcaccactcccagg

SEQ ID NO: 42 - DNA, 498 bp, Homo sapien
ctggttttgtaaaaacagtctctttattctactgtgctgaaaccctcaccaatatagaaaattagattctcattgcactgaactatatttatatgcctaagtatgtagaagtaaaattatataccccaaaaggattttatcttgttgtatatattaaatgttatttctgcatatagggtcttttatggagaaactgatgatgataagcttaatactcacttgtttagcagcatctgaatgcacaaatgctttatatatctcttctgctttacagggcaaaagatcagactctgttttcttatagtcttcacaagccagccagaactcaatattctcctcactgaattcagactttaggaaacttccaaagacattttgaccagtttggttggcaagaagtttttccagagattgagaccattgcattacttcagcagcagaaagtacatccttggacttggaagatttcattccagattccagatgtgggatcataga

SEQ ID NO: 43 - DNA, 312 bp, Homo sapien
caggaaggcggccaagaatgtgagtgcaaagattggttcctgagagccccgagaagaaaattcatgacagtgtctgggctgccaaagaagcagtgcccctgtgatcatttcaagggcaatgtgaagaaaacaagacaccaaaggcaccacagaaagccaaacaagcattccagagcctgccagcaatttctcaaacaatgtcagctaagaagctttgctctgcctttgtaggagctctgagcgcccactcttccaattaaacattctcagccaagaagacagtgagcacacctaccagacactcttcttctc

SEQ ID NO: 44 - DNA, 417 bp, Homo sapien
ctaacacatttactctccactattcgtactctggtagccatgttaaccccatcagagattccttctcaagccatgtctcagagctgagaggcatcccagcaagttttgcagctcacagttttttccgtaaattacttattctataaaattggagtaggccataaactttggagggccctagaccaattttttggattatttttcgtcttctatcattccgctgatcttagatattctctgcattaaatattaaatatcacttctaggctgaaaaatccccctaaaaatatttctagctcagatttttcctccaaattctgcaatagaagatcacaatgtgaactctgcatctccatgttaaagtctaatggacattcacacttagcatgtctcaaagaaatctcatgtaaaccatgg

SEQ ID NO: 45 - DNA, 494 bp, Homo sapien
cgcgtgtctgtggtatgtgtacacgtgcatgttctgcatgtctgtaggtcacacatgctttggtgcatgtacacgtgtgtgtgtgtatgcgtgtaggagctcacacttgtgtacacgtttgtgtgcatgcatgtgtgcaggagcttgcacgtttgtggtgggtacatgtacatatgtgagtgatcctgtgtgcaagcccccatgtggacatggctatgagtgagcgtggagccaaaagccaggtaacacgcatgcagcaggcccactgtgcgtgtctgagacggtctgtggcagggactgggtgtgaatcatgcagcaggcccactgtgcgtgtctgagacggtctgtggcagggactgggtgtgaatcagtgaccgtgtctctgaccaacatgctgaattacaaattgataatttattaacctgtgcagcaacaaataagatttttcaaaactcaacaaagtgctcaaagttgacattacttgcttcaaagtt

SEQ ID NO: 46 - DNA, 516 bp, Homo sapien
ccagtccaacctgctcctcattattgtataaatgagcagaatctatatggcggaacccagcttctattgctaattttgtgacctccaaagctttacttctcggaacctcctcctttggccgtcatttgatcattcaactctttgtcagtggcaactcccgctattttggtgtgttggtttgttactacacagtgagcacaaacatggtggtccaatacagaggctcttcctgtcaggtgtcaaccagaaagttcatctaacactgtgatatttgcatccttcttgaacagttgttggctgaagattcatttgatgaatcgatttttcaaaagagatgattcttggttcttccgagcgctcagctctcccgccgagcttctttgagacgtcctcaggtgtcctttgacgatgcgtcctccactttcacacactctagcattccttcactggggtcttcattgccccacattgggcagccaggaatgttggggtgatcagacacaacaccaggtcatg

SEQ ID NO: 47 - DNA, 459 bp, Homo sapien
ccaattcagagtggcattctgcatttctgtggcttccaagtcttagaacctcaactgacatatagcattgggcacactccagcagacgcccgaattcaaatcctggaaggatggaagaaacgcctggagaatatttgggatgagacaccactgtattttgctccaagcagcctctttgacctaaacttccaggcaggattcttaatgaaaaaagaggtacaggatgaggagaaaaacaagaaatttggcctttctgtgggccatcacttgggcaagtccatcccaactgacaaccagatcaaagctagaaaatgagattccttagcctggatttccttctaacatgttatcaaatctgggtatctttccaggcttccctgacttgctttagtttttaagatttgtgtttttctttttccacaaggaataaatgagagggaatcgaksaaaaaaaaaaaa

SEQ ID NO: 48 - DNA, 430 bp, Homo sapien
cctatattcagccacagcctctgggagtggtgctgataatcggagcttggaattaccccttcgttctcaccattcagccactgataggagccatcgctgcaggaaatgctgtgattataaagccttctgaactgagtgaaaatacagccaagatcttggcaaagcttctccctcagtatttagaccaggatctctatattgttattaatggtggtgttgaggaaaccacggagctcctgaagcagcgatttgaccacattttctatacgggaaacactgcggttggcaaaattgtcatggaagctgctgccaagcatctgacccctgtgactcttgaactgggagggaaaagtccatgttatattgataaagattgtgacctggacattgtttgcagacgcataacctggggaaaatacatgaattgtgg

SEQ ID NO: 49 - DNA, 288 bp, Homo sapien
ccatccgaagcaagattkcagatggcagtgtgaagagagaagacatattctacacttcaaagctttggwgcaattcccatcgaccagagttggtccgaccagccttggaaaggtcactgaaaaatcttcaattggattatgttgacctctaccttattcattttccagtgtctgtaaagccaggtgaggaagtgatcccaaaagatgaaaatggaaaaatactatttgacacagtggatctctgtgccacgtgggaggccrtggagaagtgtaaagatgcaggattgg

SEQ ID NO: 50 - DNA, 411 bp, Homo sapien
ccagagaatgacattcatgtccccgtggatcccttgcagagagtacatggagccactgccaccagtggtgatggaaagcactgtcttcttactccggaagggtcctttgtcatacatggcagcgtaagtgtaagcaaactctcctatgaacactcgctcaaaccagcctttcagaatggcagggactccaaaccactgcagggggaactggaatatcacaaggtctgcggcttccagcttcttttgttcagccacaatatctgggctcagatggccttctttataagccagaacagactcggcaggatactgaaagttcgcagggtccttcagtttacctgtgatgtcctttctggaaatgatgggattgaagttcatggcatagaggtccgactccaccacctcccatcc

SEQ ID NO: 51 - DNA, 503 bp, Homo sapien
gatatcttatgattaaaaacaaattaaattttaaaacacctgaagatatattagaagaaattgtgcaccctccacaaaacatacaaagtttaaaagtttggatctttttctcagcaggtatcagttgtaaataatgaattaggggccaaaatgcaaaacgaaaaatgaagcagctacatgtagttagtaatttctagtttgaactgtaattgaatattgtggcttcatatgtattattttatattgtacttttttcattattgatggtttggactttaataagagaaattccatagtttttaatatcccagaagtgagacaatttgaacagtgtattctagaaaacaatacactaactgaacagaagtgaatgcttatatatattatgatagccttaaacctttttcctctaatgccttaactgtcaaataattataaccttttaaagcataggactatagtcagcatgctagactgagaggtaaacactgatgcaattaaga

SEQ ID NO: 52 - DNA, 503 bp, Homo sapien; identical to SEQ ID NO: 51

SEQ ID NO: 53 - DNA, 531 bp, Homo sapien
tttttttttttttttaaaatgaggatattttattatttcaggtaattttcccagaggkgagaatagtacatgggaaattctctttaggccaggtctagtattacagkgtggkgctcaaggccgcccatcagaacagtgatactctcccaacagatttcatccaccccgtctccactaacttttgccataaaaattcctctgaattgtatcttcttggaagaagtaaatatctgttcgactatacaaagaaacagagaaaccactcccattgcaatcaatcttcaagagagggagcaggcaagccgtgttctttctgctgagttttatagactctgacaagctgtgaaataaacataaacagaagacaaaacagtgccacaaataagcagtagatgaccctgtgacaagacggcattgcagaacaaagactgacgtttaaaggggagtcatgcagagtaacatgggaacacaagcctgacaacctggtcagcttccacttactctagctcctttgaactctcaacactaaaa

SEQ ID NO: 54 - DNA, 450 bp, Homo sapien
ccatgggtgtctggagcwccctgaaactgtatcaaagttgtacatatttccaaacatttttaaaatgaaaaggcactctcgtgttctcctcactctgtgcactttgctgttggtgtgacaaggcatttaaagatgtttctggcattttctttttatttgtaaggtggtggtaactatggttattggctagaaatcctgagttttcaactgtatatatctatagtttgtaaaaagaacaaaacaaccgagacaaacccttgatgctccttgctcggcgttgaggctgtggggaagatgccttttgggagaggctgtagctcagggcgtgcactgtgaggctggacctgttgactctgcagggggcatccatttagcttcaggttgtcttgtttctgtatatagtgacatagcattctgctgccatcttagctgtggacaaaggggggtcag

SEQ ID NO: 55 - DNA, 648 bp, Homo sapien
caacttcaaccacaggctgctggasatgatcctcarcaagccagggctcaagtacaagcctgtctgcaaccaggtggaatgtcatccttacttcaaccagagaaaactgctggatttctgcaagtcaaaagacattgttctggttgcctatagtgctctgggatcccaccgagaagaaccatgggtggacccgaactccccggtgctcttggaggacccagtcctttgtgccttggcaaaaaagcacaagcgaaccccagccctgattgccctgcgctaccagctrcagcgtggggttgtggtcctggccaagagctacaatgagcagcgcatcagacagaacgtgcaggtgtttgaattccagttgacttcagaggagatgaaagccatagatggcctaaacagaaatgtgcgatatttgacccttgatatttttgctggcccccctaattatccattttctgatgaatattaacatggagggcattgcatgaggtctgccagaaggccctgcgtgtggatggtgacacagaggatggctctatgctggtgactggacacatcgcctctggttaaatctctcctgcttggygayttcagcaagctacagcaaagcccattggccggaaaaaatatcaagggtcaaat

SEQ ID NO: 56 - DNA, 536 bp, Homo sapien
ctggcatgagaatatttttttttttaagtgcggtagtttttaaactgtttgtttttaaacaaactatagaactcttcattgtcagcaaagcaaagagtcactgcatcaatgaaagttcaagaacctcctgtacttaaacacgattcgcaacgttctgttattttttttgtatgtttagaatgctgaaatgtttttgaagttaaataaacagtattacatttttaaaactcttctctattataacagtcaatttctgactcacagcagtgaacaaacccccactccattgtatttggagactggcctccctataaatgtggtagcttcttttattactcagtggacctgcccgggcggccgctcgaagccgaattccagcacactggcggccgttactagtggatccgagctcggtaccaagcttggccgtaatcatggtcatagctgtttcctgtgtgaaattgttatccgctcacaattccacacaacatacgagccggaagcataaagtgtaaagcctggggtgcctaatgagt

SEQ ID NO: 57 - DNA, 391 bp, Homo sapien
aggaactactgtcccagagctgaggcaaggggatttctcaggtcatttggagaacaagtgctttagtagtagtttaaagtagtaactgctactgtatttagtggggtggaattcagaagaaatttgaagaccagatcatgggtggtctgcatgtgaatgaacaggaatgagccggacagcctggctgtcattgctttcttcctccccatttggacccttctctgcccttacatttttgtttctccatctaccaccatccaccagtctatttatttgtctagttggatttcatttcttctggaaaatttattgtttattggcatgtgacccttgactgatggcttcattagcattytgtttttctttttggatccttaatagaaaactcaat

SEQ ID NO: 58 - DNA, 455 bp, Homo sapien
gaagacatgcttacttccccttcaccttccttcatgatgtgggaagagtgctgcaacccagccctagccaacgccgcatgagagggagtgtgccgagggcttctgagaaggtttctctcacatctagaaagaagcgcttaagatgtggcagcccctcttcttcaagtggctcttgtcctgttgccctgggagttctcaaattgctgcagcagcctccacccagcctgaggatgacatcaatacacagaggaagaagagtcaggaaaagatgagagaagttacagactctcctgggcgaccccgagagcttaccattcctcagacttcttcacatggtgctaacagatttgttcctaaaagtaaagctctagaggccgtcaaattggcaatagaagccgggttccaccatattgattctgcacatgtttacaataatgaggagcaggttggactgg

SEQ ID NO: 59 - DNA, 398 bp, Homo sapien
  misc_feature (1)...(398): n = A,T,C or G
ctcagaggcagcgtgcgggtgtgctctttgtgaaattccaccatggcgtaccgtggccagggtcagaaagtgcagaaggttatggtgcagcccatcaacctcatcttcagatacttacaaaatagatcgcggattcaggtgtggctctatgagcaagtgaatatgcggatagaaggctgtatcattggttttgatgagtatatgaaccttgtattagatgatgcagaagagattcattctaaaacaaagtcaagaaaacaactngntcggatcatgctaaaaggagataatattactctgctacaaagtgtctccaactagaaatgatcaatgaagtgagaaattgttgagaaggatacagtttgtttttagatgtcctttgtccaatgtgaacattt

SEQ ID NO: 60 - DNA, 532 bp, Homo sapien
gacttctgagacctggggcacccgggcctttgcggcagctactggcagggcctggccacctcataggactcagttcccttctgaacactcgggggacatgggcctctaactgcccactctgatatgcctgggtgagcctaggagggaaggctctgatttggatttctccagtcaaagctcacagaaaaaaacctggcactttgattttcatgggatggtcctaacagggtcagtcacctccgagcagtttgggaacccagtttcttgtcctgggccctcaggtcagcctggctgaattaggacccttccttggcacaggggtgagaaagagcttggggaacgcttggcattatggagggctggaaggggctcaaccccgatttggagagaagtttgggatggagtgggcgagagattgagagagcgagcaggaaaagaggtcttggagcctgggactgatggtggataaggcctggaaagaasatgacsaggaggaggagagagggaagtgggtggatgaggagcaggctga

SEQ ID NO: 61 - DNA, 466 bp, Homo sapien
gcgacggcgacgtctcttttgactaaaagacagtgtccagtgctccagcctaggagtctacggggaccgcctcccgcgccgccaccatgcccaacttctctggcaactggaaaatcatccgatcggaaaacttcgaggaattgctcaaagtgctgggggtgaatgtgatgctgaggaagattgctgtggctgcagcgtccaagccagcagtggagatcaaacaggagggagacactttctacatcaaaacctccaccaccgtgcgcaccacagagattaacttcaaggttggggaggagtttgaggagcagactgtggatgggaggccctgtaagagcctggtgaaatgggagagtgagaataaaatggtctgtgagcagaagctcctgaagggagagggccccaagacctcgtggaccagagaactgaccaacgatggggaactgatcctgaccatgacggcgga

SEQ ID NO: 62 - DNA, 548 bp, Homo sapien
ttttgaatttacaccaagaacttctcaataaaagaaaatcatgaatgctccacaatttcaacataccacaagagaagttaatttcttaacattgtgttctatgattatttgtaagaccttcaccaagttctgatatcttttaaagacatagttcaaaattgcttttgaaaatctgtattcttgaaaatatccttgttgtgtattaggtttttaaataccagctaaaggattacctcactgagtcatcagtaccctcctattcagctccccaagatgatgtgtttttgcttaccctaagagaggttttcttcttatttttagataattcaagtgcttagataaattatgttttctttaagtgtttatggtaaactcttttaaagaaaatttaatatgttatagctgaatctttttggtaactttaaatctttatcatagactctgtacatatgttcaaattagctgcttgcctgatgtgtgtatcatcggtgggatgacagaacaaacatatttatgatcatgaataatgtgctttgtaaaaagatttc

SEQ ID NO: 63 - DNA, 547 bp, Homo sapien
tttccaaagcggagacttccgacttccttacaggatgaggctgggcattgcctgggacagcctatgtaaggccatgtgccccttgccctaacaactcactgcagtgctcttcatagacacatcttgcagcatttttcttaaggctatgcttcagtttttctttgtaagccatcacaagccatagtggtaggtttgccctttggtacagaaggtgagttaaagctggtggaaaaggcttattgcattgcattcagagtaacctgtgtgcatactctagaagagtagggaaaataatgcttgttacaattcgacctaatatgtgcattgtaaaataaatgccatatttcaaacaaaacacgtaatttttttacagtatgttttattaccttttgatatctgttgttgcaatgttagtgatgttttaaaatgtgatcgaaaatataatgcttctaagaaggaacagtagtggaatgaatgtctaaaagatctttatgtgtttatggtctgcagaaggatttttgtgatgaaaggggattttttgaaaaat

SEQ ID NO: 64 - DNA, 528 bp, Homo sapien
  misc_feature (1)...(528): n = A,T,C or G
cacctmctcccsccwggcgcttwctcsgacgccttgcccascgggccgcccgaccccctgsrccatggaccccgctcgcccsctggggmtgtygatkctgctgcttttcctgrckgaggctgcactgggcgatgctgatcargagccaacaggaaataacrcggagatctgkctcctgcccctagactackgaccctgcckggccctacttytccgytactactacgacaggyacacgcagagctgccgccwgttcctgkrckggggctgcrasggcaacrccaacwattyctacacckgkgaggmttrcgackatgctwgstggargatagaaaaagttcccaaastttgccggctgmaagtgaatgaggacnaccagggtgaggggtacacagataagtatttctttaatctaakkwccatgacatgwgaaaaattctttnncggtgggngtcaccggaccggattgagaacangtttgcagatgangctactgggatgggctcctgcrcacnaaagaaantatca

SEQ ID NO: 65 - DNA, 547 bp, Homo sapien
  misc_feature (1)...(547): n = A,T,C or G
kgaatgaasaacgaacgctggaagtagaaatagagcctggggtgagagacggcatggagtacccctttattggagaaggtgagcctcacgtggatggggagcctggagatttacggttccgaatcaaagttgtcaagcacccaatatttgaaaggagaggagatgatttgtacacaaatgtgacagtctcattagttgagtcactggttggctttgagatggatattactcacttggatggtcacaaggtacatatttcccgggataagatcaccaggccaggagcgaagctatggaagaaaggggaagggctccccaactttgacaacaacaatatcaagggctctttgataatcacttttgatgtggattttccaaaagaacagttaacagaggaagcgagagaangtatcaaacagctactgaaacaagggtcagtgcagaaggtatacaatggactgcaaggatattgagagtgaataaaattggactttgtttaaaataaagtgaataagcgatatttattatctgcaaggttttttttgtg

SEQ ID NO: 66 - DNA, 535 bp, Homo sapien
ggggaggtctacgcttctagagcttgagccagcggggcgaccctgcagtggcaggactcggcaccgcgccctccaccgccggttggtggcctgcgtgacagtttcctcccgtcgacatcgaaaggaagccggacgtgggcgggcagagagcttcatcgcagtaggaatggcagccccatctatgaaggaaagacaggtctgctggggggcccgggatgagtactggaagtgtttagatgagaacttagaggatgcttctcaatgcaagaagttaagaagctctttcgaatcaagttgtccccaacagtggataaaatattttgataaaagaagagactacttaaaattcaaagaaaaatttgaagcaggacaatttgagccttcagaaacaactgcaaaatcctaggctgttcataaagattgaaagtattctttctggacattgaaaaagctccactgactatggaacagtaatagtttgaatcatagtgaacatcaatacttgttccctatatacgacacttgataattaaga

SEQ ID NO: 67 - DNA, 527 bp, Homo sapien
atttctgccacttaattcaaacagtcatatgcaggtcgcttaatttatttgtgcttttgtttcatcttctacaaggccctcttagctctaaaacttgacagtggaataaggaaatgtttttccaaatctgcattgccggtgagatcctcaacatcagcatgttgagatggacctcaaccccacctctaaccctgaaacacactactcgatattatcttaggtatgttttagggtttagtttgtaaaataataatttatttttgaaggaaatataaaatattaaagagtaataatagctatcattttttaagattcaatctaaaacaatggactctttttttttccatttgtgatgtagataagcaagacaattttgatcatgagtggtgaaaagaggatcaaacttgactattcttgcaatggcagtccagcaacaagcctttcatttacattaaattataacttttcattcattcctaaaccaaacttaaaattctgctttcctttgagtagaaggtatttaactt

SEQ ID NO: 68 - DNA, 431 bp, Homo sapien
gggaaacttcatgggtttcctcatctgtcatgtcgatgattatatatggatacatttacaaaaataaaaagcgggaattttcccttcgcttgaatattatccctgtatattgcatgaatgagagatttcccatatttccatcagagtaataaatatacttgctttaattcttaagcataagtaaacatgatataaaaatatatgctgaattacttgtgaagaatgcatttaaagctattttaaatgtgtttttatttgtaagacattacttattaagaaattggttattatgcttactgttctaatctggtggtaaaggtattcttaagaatttgcaggtactacagattttcaaaactgaatgagagaaaattgtataaccatcctgctgwtcctttagtgcaatacaataaaactctgaaattaaaact

SEQ ID NO: 69 - DNA, 399 bp, Homo sapien
gacacggcggacacacacaaacacagaaccacacagccagtcccaggagcccagtaatggagagccccaaaaagaagaaccagcagctgaaagtcgggatcctacacctgggcagcagacagaagaagatcaggatacagctgagatcccagtgcgcgacatggaaggtgatctgcaagagctgcatcagtcaaacaccggggataaatctggatttgggttccggcgtcaaggtgaagataatacctaaagaggaacactgtaaaatgccagaagcaggtgaagagcaaccacaagtttaaatgaagacaagctgaaacaacgcaagctggttttatattagatatttgacttaaactatctcaataaagttttgcagctttcaccaaraaaaaaaaa

SEQ ID NO: 70 - DNA, 479 bp, Homo sapien
cgcggcggagctgtgagccggcgactcgggtccctgaggtctggattctttctccgctactgagacacggcggacacacacaaacacagaaccacacagccagtcccaggagcccagtaatggagagccccaaaaagaagaaccagcagctgaaagtcgggatcctacacctgggcagcagacagaagaagatcaggatacagctgagatcccaggtgctgggaagggaaatgcgcgacatggaaggtgatctgcaagagctgcatcagtcaaacaccggggataaatctggatttgggttccggcgtcaaggtgaagataatacctaaagaggaacactgtaaaatgccagaagcaggtgaagagcaaccacaagtttaaatgaagacaagctgaaacaacgcaagctggttttatattaggatatttgacttaaactatctcaataaagttttgcagctttcaccaaaaaaaaaaaa

SEQ ID NO: 71 - DNA, 437 bp, Homo sapien
ctcagcggctgccaacagatcatgagccatcagctcctctggggccagctataggacaacagaactctcaccaaaggaccagacacagtgrgcaccatgggacagtgtcggtcagccaacgcagaggatgctcaggaattcagtgatgtggagagggccattgagaccctcatcaagaactttcaccagtactccgtggagggtgggaaggagacgctgaccccttctgagctacgggacctggtcacccagcagctgccccatctcatgccgagcaactgtggcctggaagagaaaattgccaacctgggcagctgcaatgactctaaactggagttcaggagtttctgggagctgattggagaagcggccaagagtgtgaagctggagaggcctgtccgggggcactgagaactccctctggaattcttgggggg

SEQ ID NO: 72 - DNA, 561 bp, Homo sapien
ggatggtatactgtaaattcagcatatggagataccattatcataccttgccgacttgacgtacctcagaatctcatgtttggcaaatggaaatatgaaaagcccgatggctccccagtatttattgccttcagatcctctacaaagaaaagtgtgcagtacgacgatgtaccagaatacaaagacagattgaacctctcagaaaactacactttgtctatcagtaatgcaaggatcagtgatgaaaagagatttgtgtgcatgctagtaactgaggacaacgtgtttgaggcacctacaatagtcaaggtgttcaagcaaccatctaaacctgaaattgtaagcaaagcactgtttctcgaaacagagcagctaaaaaagttgggtgactgcatttcagaagacagttatccagatggcaatatcacatggtacaggaatggaaaagtgctacatccccttgaaggagcggtggtcataatttttaaaaaggaaatggacccagtgactcagctctataccatgacttccaccctggagtacaagacaaccaaggctgac

SEQ ID NO: 73 - DNA, 916 bp, Homo sapien
ggagaaaataaggtggagtcctacttgtttaaaaaatatgtatctaagaatgttctagggcactctgggaacctataaaggcaggtatttcgggccctcctcttcaggaatcttcctgaagacatggcccagtcgaaggcccaggatggcttttgctgcggccccgtggggtaggagggacagagagacagggagagtcagcctccacattcagaggcatcacaagtaatggcacaattcttcggatgactgcagaaaatagtgttttgtagttcaacaactcaagacgaagcttatttctgaggataagctctttaaaggcaaagctttattttcatctctcatcttttgtcctccttagcacaatgtaaaaaagaatagtaatatcagaacaggaaggaggaatggcttgctggggagcccatccaggacactgggagcacatagagattcacccatgtttgttgaacttagagtcattctcatgcttttctttataattcacacatatatgcagagaagatatgttcttgttaacattgtatacaacatagccccaaatatagtaagatctatactagataatcctagatgaaatgttagagatgctatatgatacaactgtggccatgactgaggaaaggagctcacgcccagagactgggctgctctcccggaggccaaacccaagaaggtctggcaaagtcaggctcagggagactctgccctgctgcagacctcggtgtggacacacgctgcatagagctctccttgaaaacagaggggtctcaagacattctgcctacctattagcttttctttatttttttaactttttggggggaaaagtatttttgagaagtttgtcttgcaatgtatttataaatagtaaataaagtttttaccattaaaaaaa

SEQ ID NO: 74 - DNA, 547 bp, Homo sapien
agtggcattaacttttagaatttgggctggtgagattaattttttttaatatcccagctagagatatggcctttaactgacctaaagaggtgtgttgtgatttaattttttcccgttcctttttcttcagtaaacccaacaatagtctaaccttaaaaattgagttgatgtccttataggtcactacccctaaataaacctgaagcaggtgttttctcttggacatactaaaaaatacctaaaaggaagcttagatgggctgtgacacaaaaaattcaattactgtcatctaatgccagctgttaaaagtgtggccactgagcatttgattttataggaaaaaatagtatttttgagaataacatagctgtgctattgcacatctgttggaggacatcccagatttgcttatactcagtgcctgtgatattgagtttaaggatttgaggcaggggtaattattaaacatattgcttctattcttggaaaaatagaagkgtaaaatgttaataatacaaatgtcactgtgacctcctccactgagagg

SEQ ID NO: 75 - DNA, 793 bp, Homo sapien
tgaggaagttgcaagccaacaaaaaagttcaaggatctagaagacgattaagggaaggtcgttctcagtgaaaatccaaaaaccagaaaaaaatgtttatacaaccctaagtcaataacctgaccttagaaaattgtgagagccaagttgacttcaggaactgaaacatcagcacaaagaagcaatcatcaaataattctgaacacaaatttaatatttttttttctgaatgagaaacatgagggaaattgtggagttagcctcctgtggagttagcctcctgtggtaaaggaattgaagaaaatataacaccttacaccctttttcatcttgacattaaaagttctggctaactttggaatccattagagaaaaatccttgtcaccagattcattacaattcaaatcgaagagttgtgaactgttatcccattgaaaagaccgagccttgtatgtatgttatggatacataaaatgcacgcaagccattatctctccatgggaagctaagttataaaaataggtgcttggtgtacaaaactttttatatcaaaaggctttgcacatttctatatgagtgggtttactggtaaattatgttattttttacaactaattttgtactctcagaatgtttgtcatatgcttcttgcaatgcatattttttaatctcaaacgtttcaataaaaccatttttcagatataaagagaattacttcarattgagtaattcagaaaaactcaagatttaagttaaaaagtggtttggacttgggaacaggactttatacct

SEQ ID NO: 76 - DNA, 461 bp, Homo sapien
accttgcactattcccctcagtccatctatcgaggtctttgcaggaagcatactgggaattgaaacgagagcctaaatgacatctaagaaaggcagtgttcaataccaggtattaggtgaggatgggattctaaggacatcagtgggaggcagggagccaccttcagacctcagcatggaagcttccaagatccagaggaagaggcaacagcactgagagtcataggtagaagaatcatcacagccctgctaaccaggcagctgatgcccctctcccctggctccctgtgtccaaatcctacaggggcatctgttggctgaactcaacctgaagccaaagagaagatgagtggagagaggcaacatttatagagctcaggtttctagggctggagagggatctggagggacacacaggagacacctggcataaccaaaaaatgattaaaaaaaaaaaaaaa

SEQ ID NO: 77 - DNA, 642 bp, Homo sapien
ggttgcacgaaacacactggggaatggagcaaaacagtctttgaatatcgaacacgcaaggctgtgagactacctattgtagatattgcaccctatgacattggtggtcctgatcaagaatttggtgtggacgttggccctgtttgctttttataaaccaaactctatctgaaatcccaacaaaaaaaatttaactccatatgtgttcctcttgttctaatcttgtcaaccagtgcaagtgaccgacaaaattccagttatttatttccaaaatgtttggaaacagtataatttgacaaagaaaaatgatacttctctttttttgctgttccaccaaatacaattcaaatgctttttgttttatttttttaccaattccaatttcaaaatgtctcaatggtgctataataaataaacttcaacactctttatgataacaaaaaaaarawawattctttgaatcctagcccatctgcagagcaatgactgtgctcaccagtaaaagataacctttctttctgaaatagtcaaatacgaaattagaaaagccctccctattttaactacctcaactggtcagaaacacagattgtattctatgagtcccagaagatgaaaaaaattttatacgttgataaaact

SEQ ID NO: 78 - DNA, 519 bp, Homo sapien
gcagaagaagaagcggaccttccgcaagttcacctaccgcggcgtggacctcgaccagctgctggacatgtcctacgagcagctgatgcagctgtacagtgcgcgccagcggcggcggctgaaccggggcctgcggcggaagcagcactccctgctgaagcgcctgcgcaaggccaagaaggaggcgccgcccatggagaagccggaagtggtgaagacgcacctgcgggacatgatcatcctacccgagatggtgggcagcatggtgggcgtctacaacggcaagaccttcaaccaggtggagatcaagcccgagatgatcggccactacctgggcgagttctccatcacctacaagcccgtaaagcatggccggcccggcatcggggccacccactcctcccgcttcatccctctcaagtaatggctcagctaataaaaggcgcacatgactccaaaaaaaaaaaaaaaagggcggccgccaccgcgggggagctccacttttgttccctttaatga

SEQ ID NO: 79 - DNA, 526 bp, Homo sapien
gtctggaggcggtgtcctctccgccctgtcgggtcctggatgagtacgagttatggtcacggtcacagcctgatctcttatgtgttcatagccattcgctctcccatcagaactgtttgtcctgaatgtgttcctctagttctagaaaatgaccactaatttaaaaaactcggttgtgaggtttgcccagaggcacttgttccagaatttcccctcctgcttcagccatgtccttgtcacttggcattctaagctaaagctttagcttcccaattcgtgatgtgctaggccaagattcgggagctgttgccagcctcgtcaaatatggaagagaaacaacctgcggtcaaaagggagtgatttgttaagtggtgcgcgtctatctcataactagatgtaccaaccagggaagggccaaggatggaaaggggtaacttttgtgcttccaaagtagctaagcagaagtgggggagcagtttagccagatgatctttgattaggcaaacattgagttttaaagaggctg

SEQ ID NO: 80 - DNA, 281 bp, Homo sapien
gttatattagtgggtagtgtaacattttatccaggttggggtgaggggagatggccacagtagcaagtggtgacactaaataccattttgaaggctgatgtgtatatacatcattactgtccgtagcaatgaaggatacagtactgtgttgtgggtgagtgttgctattgcccagcattaatatttgggtgtgtatgtttgaggctatgaaacacgcaggagtgtttttgtgctattaattttaagagaaagcagctttttcttaaaattcactgttgaga

SEQ ID NO: 81 - DNA, 405 bp, Homo sapien
  misc_feature (1)...(405): n = A,T,C or G
gtgggtgggagcgcgtgctgttgggagttgcttggaggttggcggcgcggggctgaaggctagcaaaccgagcgatcatgtcgcacaaacaaatttactattcggacaaatacgacsacgaggagtttgastatcgacatgtcatgctgcccaaggacatakccaasctggtccctaaaacccatctgatgtctgaatctgaatggaggaatcttggcngttcagmagantcagggatgggtccattatatgatccatganccagaacctcdcatcttgctgttccggcgscccacttaccccaanaaaccaamgaaatgaaccttggctactacttttcaatcctcaaakcttttcacavhtgaccttccttcctaacattctttmtgataaacatttattaag

SEQ ID NO: 82 - DNA, 547 bp, Homo sapien
tagtttttaagaagaaattttttttggcctatgaaattgttaaacctggaacatgacattgttaatcatataataatgattcttaaatgctgtatggtttattatttaaatgggtaaagccatttacataatatagaaagatatgcatatatctagaaggtatgtggcatttatttggataaaattctcaattcagagaaatcatctgatgtttctatagtcactttgccagctcaaaagaaaacaataccctatgtagttgtggaagtttatgctaatattgtgtaactgatattaaacctaaatgttctgcctaccctgttggtataaagatattttgagcagactgtaaacaagaaaaaaaaaatcatgcattcttagcaaaattgcctagtatgttaatttgctcaaaatacaatgtttgattttatgcactttgtcgctattaacatcctttttttcatgtagatttcaataattgagtaattttagaagcattattttaggaatatatagtkgtcacagtaaatatcttgttttttctatg

SEQ ID NO: 83 - DNA, 529 bp, Homo sapien
ctattctaagagatgctcttagtgatcttgcattacactttctgaataaaatgaagatcatggtgattaaggatattgaaagagaagacattgaattcatttgtaagacaattggaaccaagccagttgctcatattgaccaatttactgctgacatgctgggttctgctgagttagctgaggaggtcaatttaaatggttctggcaaactgctcaagattacaggctgtgccagccctggaaaaacagttacaattgttgttcgtggttctaacaaactggtgattgaagaagctgagcgctccattcatgatgccctatgtgttattcgttgtttagtgaagaagagggctcttattgcaggaggtggtgctccagaaatagagttggccctacgattaactgaatattcacgaacactgagtggtatggaatcctactgcgttcgtgcttttgcagatgctatggaggtcattccatctacactagctgaaaatgcccggcctgaatcccatttctacagtaacag

SEQ ID NO: 84 - DNA, 527 bp, Homo sapien
cccatcaccagaatcccttcatgggagggatggatgcctgttgaaactcactgacctattggactgacgctggggtggtatcttcatcagagctattgtaagtcatccaaaaggcttctgacgaaagaacaatttttaaaaagtccctcttttcaatcaagccaatgtcctattttatttctaaaagttttgggactcgtgctgttatcaagtacaatgaaaatggctttataaatagctgttttgacattgtgatagaaggcttgaatacggaggaaagatgtcgctggagctagtcctgagttccgactgtccctgtggtgggaatccagtctgggaaagcaggactgttttagcaaacgtgtactcgttctataaaaatggaatctgttctgcaggttaccgtccctccccgcccaagcatcccctctgtcctgtctctctgctgctgggacccagggctttttcagctgcagaacccactggacttccaggaatcaaggaaaaagtggaaatgtccaactgtg

SEQ ID NO: 85 - DNA, 401 bp, Homo sapien
cagtgtggtggaattcccaagatagaaatgaaaaactcttttatagagtgctgacatctgacattgagaaattcatgcctattgtttatactcccactgtgggtctggcttgccaacaatatagtttggtgtttcggaagccaagaggtctctttattactatccacgatcgagggcatattgcttcagttctcaatgcatggccagaagatgtcatcaaggccattgtggtgactgatggagagcgtattcttggcttgggagaccttggctgtaatggaatgggcatccctgtgggtaaattggctctatatacagcttgcggagggatgaatcctcaagaatgtctgcctgtcattctggatgtgggaaccgaaaatgaggagttacttaaagatcca

SEQ ID NO: 86 - DNA, 547 bp, Homo sapien
gaagcctcttgtgtttgtgtgcagagaagtatatgatccaccatgctaatgacacttgcctttttttccaccattaaggctttaagaacatgtggaataagttttttagctgctaatgacaaaacaaatcctgtaactacccagccagcaagtatatagcacagaacactgtgttactttacaagggcttatgtgactggaataaggtggtcccacttgactgttccaaagagcagcttctcagatcttcagtgttcactggtaaatttctaacagtgtatttgtgtaaagtttgtcatttcatactccatacactacagttgctgtcactgatccctgttttgctggcttttaagctacttggtcaaaaatcctgcttccttaaaacatagagaattaatgagcatctcaagctttttcttttcctttttaatgatgcctgcactatcaagagtattctagtgttctctctttgtttggcatataatcatgcaccaaactttttatttctttaaggtgggagtatatttttatttcctaaatgcca

SEQ ID NO: 87 - DNA, 530 bp, Homo sapien
atggattcgaaataccagkgtgtgaagctgaatgatggtcacttcatgcctgtcctgggatttggcacctatgcgcctgcagaggttcctaaaagtaaagctctagaggccgtcaaattggcaatagaagccgggttccaccatattgattctgcacatgtttacaataatgaggagcaggttggactggccatccgaagcaagattgcagatggcagtgtgaagagagaagacatattctacacttcaaagctttggagcaattcccatcgaccagagttggtccgaccagccttggaaaggtcactgaaaaatcttcaattggactatgttgacctctatcttattcattttccagtgtctgtaaagccaggtgaggaagtgatcccaaaagatgaaaatggaaaaatactatttgacacagtggatctctgtgccacrtgggaggccatggagaagtgtaaagatgcaggattggccaagtccatcggggtgtccaacttcaaccacaggctgctggagatgatcct

SEQ ID NO: 88 - DNA, 529 bp, Homo sapien
acctgagctaagaaggataattgtcttttggtaactaggtctacaggtttacatttttctgtgttacactcaaggataaaggcaaaatcaattttgtaatttgtttagaagccagagtttatcttttctataagtttacagcctttttcttatatatacagttattgccacctttgtgaacatggcaagggacttttttacaatttttattttattttctagtaccagcctaggaattcggttagtactcatttgtattcactgtcactttttctcatgttctaattataaatgaccaaaatcaagattgctcaaaagggtaaatgatagccacagtattgctccctaaaatatgcataaagtagaaattcactgccttcccctcctgtccatgaccttgggcacagggaagttctggtgtcatagatatcccgttttgtgaggtagagctgtgcattaaacttgcacatgactggaacgaagtatgagtgcaactcaaatgtgttgaagatactgcagtcatttttgt

SEQ ID NO: 89 - DNA, 547 bp, Homo sapien
gtttatatatatagcgaataaatctagttgtataaatttttaaatgccgtcagtagaaagcacacaaggttatgatttttttaattactggcttctgatttctttcacttctgatccttttcctttttctcagatgtagctgagtcttgatcattttaagacaacgatgggtagaattttgagattaatgttaattttccctttttgttaatttcagtcccctctcactatgcttttgtccagaaggatcaagaattctaccatcccttgggtctttgtgtataaacaatgttaaataaaggtagactcagtctttaagatattagacagtttttttagtccatgggattgtaaatataaacattaactttcctataagaatattttggctttgtaatctatagcctcaaattggtatttattatggattcactagacaaacagctgtttccttattgtcttttttctttagtgtttctgatttgctatcagtagctgtttttaaagccatccaaggaaaataattatttacagtttttgaagtcac

SEQ ID NO: 90 - DNA, 528 bp, Homo sapien
gagcagcagaagctgtacagcaagatgatcgtggggaaccacaaggacaggagccgctcctgagcctgcctccagctggctggggccaccgtgcggggtgccaacgggctcagagctggagttgccgccgccgcccccactgctgtgtcctttccagactccagggctccccgggctgctctggatcccaggactccggctttcgccgagccgcagcgggatccctgtgcacccggcgcagcctacccttggtggtctaaacggatgctgctgggtgttgcgacccaggacgagatgccttgtttcttttacaataagttgttggaggaatgccattaaagtgaactccccacctttgcacgctgtgcgggctgagtggttggggagatgtggccatggtcttgtgctagagatggcggtacaagagtctgttatgcaagcccgtgtgccagggatgtgctgggggcggccacccgctctccaggaaaggcacagctgaggcactgtggctggcttcggcctcaacat

SEQ ID NO: 91 - DNA, 547 bp, Homo sapien
atataccatttaatacatttacactttcttatttaagaagatattgaatgcaaaataattgacatatagaactttacaaacatatgtccaaggactctaaattgagactcttccacatgtacaatctcatcatcctgaagcctataatgaagaaaaagatctagaaactgagttgtggagctgactctaatcaaatgtgatgattggaattaraccmtttggscyttgraccttymtwrgraaaawgrmccmacctttyttaacmtgraccwccytmatctctagaagctgggatggacttactatyctkgttwatattttaaatackgaaaggtgctatgcttctgttattattccaagactggagataggcagggctaaaaaggtattattatttttcctttaatgatggtgctaaaattcttcctataaaattccttaaaaataaagatggtttaatcactaccattgtgaaaacataactgttagacttcccgtttctgaaagaaagagcatcgttccaatgcttgttcactgttcctctgtc

SEQ ID NO: 92 - DNA, 527 bp, Homo sapien
  misc_feature (1)...(527): n = A,T,C or G
gctggctagtaggggaacatgtagtagccaagcccatgcattgcagtgcacagagcaacattggggtaacaggatgggtacctgtcacggcctgtgcaaacataacatgtgtcaccacactgaaggtatggtggaacaagtggcctcaccaaggtcggaccccaatggactttttgcctcttgggagcttatgggtctatgaggacacagtagcctttcctatcagcaaactggagtggatgttgtatctgggggtggccttatgtacctgctactgttctccccacattgcccagatgcctgtataactgggaggcactgkgctctcagtttttgcgaatgtgatgagccccctggtgtttctacccttttggcaatgactatccctggagncatgtgtcaaaactgtaaagcacaatttactgctctttgcggagcacaccgctcatgctctgaattacacctgaktgtccctcctccwgktawtgaatgaggttgatcnvatcagaaadgtggkgttggcmata

SEQ ID NO: 93 - DNA, 531 bp, Homo sapien
ggtattcatacagccttcctaaaggcaatgctttccacaggatttaagataccccagaaaggcatcctgataggcatccagcaatcattccggccaagattccttggtgtggctgaacaattacacaatgaaggtttcaagctgtttgccacggaagccacatcagactggctcaacgccaacaatgtccctgccaccccagtggcatggccgtctcaagaaggacagaatcccagcctctcttccatcagaaaattgattagagatggcagcattgacctagtgattaaccttcccaacaacaacactaaatttgtccatgataattatgtgattcggaggacagctgttgatagtggaatccctctcctcactaattttcaggtgaccaaactttttgctgaagctgtgcagaaatctcgcaaggtggactccaagagtcttttccactacaggcagtacagtgctggaaaagcagcatagagatgcagacaccccagccccattattaaatcaacctgagccacatgt

SEQ ID NO: 94 - DNA, 547 bp, Homo sapien
  misc_feature (1)...(547): n = A,T,C or G
gttaaacatggtctgcgtgccttaagagagacgcttcctgcagaacaggacctgactacaaagaatgtttccattggaattgttggtaaagacttggagtttacaatctatgatgatgatgatgtgtctccattcctggaaggtcttgaagaaagaccacagagaaaggcacagcctgctcaacctgctgatgaacctgcagaaaaggctgatgaaccaatggaacattaagtgataagccagtctatatatgtattatcaaatatgtaagaatacaggcaccacatactgatgacaataatctatactttgaaccaaaagttgcagagtggtggaatgctatgttttaggaatcagtccagatgtgagttttttccaagcaacctcactgaaacctatataatggaatacatttttctttgaaagggtctgtataatcattttctagaaagtatgggtatctatactaatgtttttatatgaagaacataggtgtctttgtggttttaaagacaactgtgaaataaaattgtttcaccgcctggtn

SEQ ID NO: 95 - DNA, 1265 bp, Homo sapien
gtggtcaagcagtgatttttctgggactgcagaagttcctgctgtgcccaacctttattactaactgggaaagacccagggagactgggatgggctcatgattctacatacagaactcatccaagaaaggaggaaaagctgatttttgtgaacgtcgctacttgtgcctgaactaactctcaggcacattagtcagaaaatactacctatggttactcccccaggttcctaaaagtaaagctttagaggccaccaaattggcaattgaagctggcttccgccatattgattctgctcatttatacaataatgaggagcaggttggactggccatccgaagcaagattgcagatggcagtgtgaagagagaagacatattctacacttcaaagctttggtgcaattcccatcgaccagagttggtccgaccagccttggaaaggtcactgaaaaatcttcaattggattatgttgacctctaccttattcattttccagtgtctgtaaagccaggtgaggaagtgatcccaaaagatgaaaatggaaaaatactatttgacacagtggatctctgtgccacgtgggaggccgtggagaagtgtaaagatgcaggattggccaagtccatcggggtgtccaacttcaaccgcaggcagctggagatgatcctcaacaagccagggctcaagtacaagcctgtctgcaaccaggtggaatgtcatccttacttcaaccagagaaaactgctggatttctgcaagtcaaaagacattgttctggttgcctatagtgctctgggatcccaccgagaagaaccatgggtggacccgaactccccggtgctcttggaggacccagtcctttgtgccttggcaaaaaagcacaagcgaaccccagccctgattgccctgcgctaccagctrcagcgtggggttgtggtcctggccaagagctacaatgagcagcgcatcagacagaacgtgcaggtttttgagttccagttgactgcagaggacatgaaagccatagatggcctaaacagaaatgtgcgatatttgacccttgatatttttgctggcccccctaattatccattttctgatgaatattaacatggagggcattgcatgaggtctgccagaaggccctgcgtgtggatggtgacacagaggatggctctatgctggtgactggacacatcgcctctggttaaatctctcctgcttggtgatttcagcaagctacagcaaagcccattggccaga

SEQ ID NO: 96 - DNA, 568 bp, Homo sapien
ccagtgtggtggaattcggtttaattacaaaatttgatcacgatcatattgtagtctctcaaagtgctctagaaattgtcagtggtttacatgaagtggccatgggtgtctggagcaccctgaaactgtatcaaagttgtacatatttccaaacatttttaaaatgaaaaggcactctcgtgttctcctcactctgtgcactttgctgttggtgtgacaaggcatttaaagatgtttctggcattttctttttatttgtaaggtggtggtaactatggttattggctagaaatcctgagttttcaactgtatatatctatagtttgtaaaaagaacaaaacaaccgagacaaacccttgatgctccttgctcggcgttgaggctgtggggaagatgccttttgggagaggctgtagctcagggcgtgcactgtgaggctggacctgttgactctgcagggggcatccatttagcttcaggttgtcttgtttctgtatatagtgacatagcattctgctgccatcttagctgtggacaaaggggggtcagctggcatgagaatattttt

SEQ ID NO: 97 - DNA, 546 bp, Homo sapien
ttgtaccgtatctgtaggcatcctgtaaataattccaaggggaaaactaaacgaggacgtgggttgtatcctgccaggttgagtggggctcacacgctagggtgagatgtcagaaagcgcttgtattttaaacaaccaaaaagaattgtaagggtggcttgctgccaggcttgcactgccgttcctgggggtgtgcatcttcgggaaaggtggtggcggggcgtccactaggtttcctgtcccctgctgctccttccgtaagaaaatgaaatattctatgcctaatactcacacgcaacatttcttgtactttgtaagtcgtttgcgagaatgcagaccacctcactaaactgtaaacggtaaagagatttttacttttggtctccgtgagtcgcatctctactaaggtttacacaggaattccacctgaagacttgtgttaaagttctacagcgcgcactgttaactgaacgtctttttcttcagcctatacgcggatccttgttttgagctctcagaatcactcagacaacattttgtaactgc

SEQ ID NO: 98 - DNA, 547 bp, Homo sapien
tactgggtgccaagctatgtgccaggcactttacatgtattgatttaacacttaacagccactctatattattccctttttacagatgaggcaatttaagctcaaagcatttaagtagacaaccaacctagaatcacatagcaaatgacagaagccagaggcctcccaagtctctctaactccaaaccctatgcttactctactatatcacactaccttgcaataggacaaagggaatatgtggtaaactatgttcccagcatctaaaagccaggagtggttttcatttttctttaagaagatgatagtgtgatttgaaacatatctgaatttcagaagaggggacttttaaaaattgccactcataaggaaagaaagaactttttcacatatttttgaaagaaacgatggtgagaagatattcttgataatagagatatgctaacatttgctttgggtgttttgtaggttagatttttttggtgtgtactttataggcttgcatattgcttactttaaacagctgaagttctaagtaagagtgttc

SEQ ID NO: 99 - DNA, 122 bp, Homo sapien
cagcctttctgtcatcatctccacagcccacccatcccctgagcacactaaccacctcatgcaggccccacctgccaatagtaataaagcaatgtcacttttttaaaacaaaaaaaaaaaaa

SEQ ID NO: 100 - DNA, 449 bp, Homo sapien; identical to SEQ ID NO: 10

SEQ ID NO: 101 - DNA, 131 bp, Homo sapien
ccatgttctctcttgactacgcatatgtgagatttgcccctccgccccgctcgtgatagccatccagatcttttacctggccctgtcttggagaatctgttttcaatctccactgattgcccccttgctgg

SEQ ID NO: 102 - DNA, 199 bp, Homo sapien
ctgctgcgcctgatgctgggacagccccgctcccagatgtaaagaacgcgacttccacaaacctggattttttatgtacaaccctgaccgtgaccgtttgctatattcctttttctatgaaataatgtgaatgataataaaacagctttgacttgaaaaaaaaaaaaaaaaaaaaaaaaaaaaaaaaaaaaaaaaaaaa

SEQ ID NO: 103 - DNA, 321 bp, Homo sapien
ttttttaggtttttaaactttttatttgcatattaaaaaaattgtgcattccaataattaaaatcatttgaacaaaaaaaaatggcactctgattaaactgcattacagcctgcaggacaccttgggccagcttggttttactctagatttcactgtcgtcccacccccacttctttcaccccactttttccttcaccaacatgcaaagtctttccttccctgccacccagataatatagacagatgggaaaggcaggcgcggccttcgttgtcagtagttctttgatgtgaaaggggcagcacagtcatttaaacttgat

SEQ ID NO: 104 - DNA, 309 bp, Homo sapien
tttttttttttttttatttttttttttgcatcaaaaaactttatttccatttggcccaaggcttgttaggatagttaaaaaagctgcctattggctggagggagaggcttaggcaaaacccctattactttgcaaggggcccttcaaaagtctctgggcttctatttcaaccgcgatgatgtggctctggaaggcgtgagccactttttccgggaactggccaaggaaaagcccgagggctacaaccgtttcctgaaaatgcaaaaccagcggggcggccgcgctcttttccaggacatcaaaaagcca

SEQ ID NO: 105 - DNA, 591 bp, Homo sapien
cttatttctgcatgggtcggagagtgggcgggactgctttactgagttatagtgaatgtagttttaacctaagcgcctcacatgactaactcctcatccatcaagaatgagctcagctctcacttccccactcctcacccccctgtaaagtaacctttctccaaggttatgcttcaacaggaatagctaacatttattaaattgtggcacgtaagtatcttggatatattggctcattgaatcctcacacctactattttacagagatgccagtggggcttgagattgaatcacttgcccaggctcccactgctggtaaacagtagagggggctcctgacccatcagtctggcttgacaacccattccctcaactgcggatcccggattcccttatcaccctgttgatttctccataggctgtggtaacatttgttgcatgaatggaccgttgaaatagggcctggcagggagaaattcaggaaatgaatgaatggttcttccctggcagcctttgatgacttacaagccccttcaagggggaaagccatttttctccctgggactccttgaaagcccgggagccctgcct

SEQ ID NO: 106 - DNA, 450 bp, Homo sapien
ctgccactcctgcctctgctaccccgaaaccggagagggagctcaataataacacaggtcccactaaactaattaaggtgttggcataacctgtcattgaattcaagtgtccaacaactgtttgcttaaaatatcattagacctaatatttttttcaaaggcacaaagtttaaacatggggggggcgggtgttgagaggggtctgggatacccttaaacccaaaaaagtgatttgttcccccttgcccagaagggtgactgttccactgggcctgtcaccacaggacattttccatgacaagcactcaccttcttggggaaggggcatcaggttggcacaggaaaggcccaagtgaggggccactctgtacattaatactttggtgattaatgtttggggagaggcaggattctcacccacctttttgacttcaaacactctcactcaag

SEQ ID NO: 107 - DNA, 116 bp, Homo sapien
tcgacgaaagttactgtcactcagttgtaaatccatcagcttttcacctgttaaaaattttgcaaaatatacatgttctcctcctgttttcaattcttccatcttttttcttgagg

SEQ ID NO: 108 - DNA, 291 bp, Homo sapien
ctgctcgaagttgtcaaaacccacgtgcagggcaatggagagtccgatggccgaccacagcgagtagcgtcctcccacccaatcccagaactcgaacatgttttgagggtcaattccaaactccttcactttggttgtgttagtagacagggcaacaaagtgcttcgccactgcagtaggatccttggccgcctggagaaaccactccttcgccgtctctgcattcgtgatggtctcctgggtagtaaaggtcttggaggcaatgatgaacagggaggactcggggttcag

SEQ ID NO: 109 - DNA, 662 bp, Homo sapien
gctgtttccacagtacgcctgcctcacaccttgcgatgcgccaacatcaccatcattgagcaccagaagtgtgagaacgcctaccccggcaacatcacagacaccatggtgtgtgccagcgtgcaggaagggggcaaggactcctgccagggtgactccgggggccctctggtctgtaaccagtctcttcaaggcattatctcctggggccaggatccgtgtgcgatcacccgaaagcctggtgtctacacgaaagtctgcaaatatgtggactggatccaggagacgatgaagaacaattagactggacccacccaccacagcccatcaccctccatttccacttggtgtttggttcctgttcactctgttaataagaaaccctaagccaagaccctctacgaacattctttgggcctcctggactacaggagatgctgtcacttaataatcaacctggggttcgaaatcagtgagacctggattcaaattctgccttgaaatattgtgactctgggaatgacaacacctggtttgttctctgttgtatccccagccccaaaagacagctcctggaccttgccccggggcggcccgctcggaaagggggcgaaatttcttcaagaatatttccatttccacaaacttggggccgggggccc

SEQ ID NO: 110 - DNA, 323 bp, Homo sapien
tcctgtgaaacagcccattttcctacctactgtgggttgctgctcaggaggaacgatatacgccaatacaagcaggaaatctgcagctcctctgctatgtgcctcagaacactttcaatttttctggtcaatgctctgattaggtatcatacataaaagccagcatattagtttaaatctctaacaaaaaactatattttccaaagtcattatcatttgggccaattaagtgatcttttcgtgctttgttgagcttcatctttagggcatctcttctttcttcccattcatgaagttcggcatttccatgtgcaaatttacag

SEQ ID NO: 111 - DNA, 336 bp, Homo sapien
tccagtgcgctccagccttatctaggaaaggaggagtgggtgtagccgtgcagcaagattggggcctcccccatcccagcttctccaccatcccagcaagtcaggatatcagacagtcctcccctgaccctcccccttgtagatatcaattcctaaacagagccaaatactctatatctatagtcacagccctgtacagcatttttcataagttatatagtaaatggtctgcatgatttgtgcttctagtgctctcatttggaaatgaggcaggcttcttctatgaaatgtaaagaaagaaaccactttgtatattttgtaataccacctctgtgg

SEQ ID NO: 112 - DNA, 218 bp, Homo sapien
tttttttttttttttttttttccagtcaggagtatttttaatcactgtctacagagacacctacatacacacacgggtggggaatgaacccaaagtttttaggtgaagtctctcagggcccaccccgtgccacagaccttcctcggttgcagagattctgggcaaagcatccgtgctctcatgagattatcctggggagatttagaagaattttgtgg

SEQ ID NO: 113 - DNA, 533 bp, Homo sapien
ctgcaccgacagttgcgatgaaagttctaatctcttccctcctcctgttgctgccactaatgctgatgtccatggtctctagcagcctgaatccaggggtcgccagaggccacagggaccgaggccaggcttctaggagatggctccagaaaggcggccaagaatgtgagtgcaaagattggttcctgagagccccgagaagaaaattcatgacagtgtctgggctgccaaagaagcagtgcccctgtgatcatttcaagggcaatgtgaagaaaacaagacaccaaaggcaccacagaaagccaaacaagcatcccagagcctgccagcaatttctcaaacaatgtcagctaagaagctttgctctgcctttgtaggagctctgagcgcccactcttccaattaaacattctcagccaagaagacagtgagcacacctaccagacactcttcttctcccacctcactctcccactgtacccacccctaaatcattccagtgctctcaaaaagcatgtttttcaagatctaaa

SEQ ID NO: 114 - DNA, 261 bp, Homo sapien
  misc_feature (1)...(261): n = A,T,C or G
ccatatctgctcggcgctacttctttcttggattgatcctgantgatgcattggcgatgcctttggagaaggacatgtgatgtgatggtcttcacgttccacatgtactcgggcaaatagggggacaaactgaagttaaacaggtcgaaactagaggagctgctgaccctggagctgaccactttcttggggaaaaggacacatgaaggtgctttgcaaaagctgatgagcaatctggacaccaacataggacaacaacgt

SEQ ID NO: 115 - DNA, 267 bp, Homo sapien
cctctcctgtgggttccagaccctgttccagcaacaattgctgggacacctgggccgactgctccacctcgccaggccctggccctctccatctcagccctgacagccacccagtgataaacacagcaggcttcctaagcaatgtgacgcaccagaggggtggtggtacacgttccccttgaagtcatctgaaaattagagaacagatttgcctcatagctgaagagagaccctattccaagcatgaatggccttgacaatgttcct

SEQ ID NO: 116 - DNA, 239 bp, Homo sapien
ctgatgacctggggtctagtgaaaatgcagggtcagattcagtgggtctggggtctgaatctctaaggcgctgccaagtgatgctgatgctcctggcttgtggaccaccctgtgtatagcaaagctctagactaggaggtctcaaccttggctgcacagaattatctggggagtttttaaatttcccagtgcccaggctgcattcatatcatagtagagacagggttttgccatgctgg

SEQ ID NO: 117 - DNA, 168 bp, Homo sapien
aaaaaacttttatattgctgcatcttccacagttctttgggtagtctctgaacttaaaatttgtaggagttgtagactacctaaatttttaagttatggatttgttcataggttgtaggggtaggtaaagaaggaaacagacaagaaaatggcttcttgaggtggcag

SEQ ID NO: 118 - DNA, 150 bp, Homo sapien
aaaaaaaagagtttatttagaaagtatcatagtgtaaacaaacaaattgtaccactttgattttcttggaatacaagactcgtgatgcaaagctgaagtgtgtgtacaagactcttgacagttgtgcttctctaggaggttgggtttttt

SEQ ID NO: 119 - DNA, 154 bp, Homo sapien
aaactgtgtgagatattaaccagccgccctgttataaaatcaggaaatccaaacagcgatttacaccgattaacacccccttttatattttttcaaatacactgagaaaataatcaaacgttttcatctctcttgtctttttttgttttttcct

SEQ ID NO: 120 - DNA, 314 bp, Homo sapien
ctgcgtggagtgacgggaggagggaatcactgtgtgtgcgagagtgcttcagactcaatttccaaaataattttcacccctctaagcatgtaaattcaaagatggatccttcatagaaattaaaaaatcaatttgagctcatttcgaatacagaacaagtatggcacagatggaagtcctgccacgtttcctttaatgatgctgactcttgtatcacacaggccagcatgaagtttcttactcagactttacaggcattttccgtaattcaatcagtcctgctcccagcacaacacaggaggtgattcgagaat

SEQ ID NO: 121 - DNA, 601 bp, Homo sapien
aaaaaaaacctaattcattgaagtaataaccaaataattttcaatcttgattcaactgtgattcaaatcttacaccatttgccccttctatgaatttatgtataaaattttttaagagtcagagtttttttttcttgattaattggatgtatttcacagaatttccaactgctcacgttagttttcttccttttagagttgatctctctaatgtattagatcttcatgcctttgatagtctctctggaataagtttgcagaaaaaacttcagcatgtgccaggaacacaacctcaccttgatcagagtattgtacaatcacatttgacgtaccaggaaatgcaaaggaagaacatcttaatatgtttattcagaatcttctgtgggaaaagaatgtgagaaacaaggacaatcactgcatggaggtcataaggctgaagggattggtgtcaatcaacgacaaatcacaacaagtgattgtccagggtgtccatgagctctgtgatctggaggagactccagtgagctggaaggatgacactgagagaacaaatcgattggtcctcattggcagaaatttagataaggatatccttaaacag

SEQ ID NO: 122 - DNA, 486 bp, Homo sapien
ctgtttctaattgcttttgtgactgttaccttttagttcatgcccccccaaagagctaaatttcacatttttacctacaaaattgatttttaattcctgcaaataatttaccattatgagctacaaggtgggcaacagcgcctgaggatctaattttatgcatattactcccaagtattttaacacttgttggagaagcaatatctggatcaataaaacactgtcccatcaaccatttgagtggggagagggagaagctcttctgtaagtaagattctggcaagctctttgaaatgagtcttctttcccacagattttctctactctttcaatacaaacagataggagaagagggaatagaaacctggaggaacttgaatatttttgttctagatagagatacagttattgaaaaggaaacctagaaagtagtcacacgtcgcttatttaggccagaagtaattgtactgggcaaaaatttcactt

SEQ ID NO: 123 - DNA, 239 bp, Homo sapien
ctggtgggtctttttttcctctcagagctcaagcctgtagtgcctgatgtcatttctttcaagttgcccacagtatctccacttaaactaggctagtaaccaaaataatgtggaccttctttaggaaacagtgtgggagaataggagtccagccgtaagataaactggaaatatttgggcgtcttgtacctggctacgcaccacctcagtgttgttcctacataaacaaggcccctttt

SEQ ID NO: 124 - DNA, 610 bp, Homo sapien
  misc_feature (1)...(610): n = A,T,C or G
ccanccaagtcnttgatgatcactgacccncgcgcgcctgctggaccaaggtggctgcggggaaatcgccacngngctttcggttttcttggtgaaggaatacaccgcgccgacagcaggttttcagtcagggtcagggactgttgcttgcgcgcgaaaatcaccggtacgccgaggttcaggccggtcatgatcgccggtgcaatgcccgaggcttcgatggtgacgatcttggtgatgcccgaatccttgaacaacgcagcgaattcatcaccgatcagtttcatcagcgccgggtcgatctggtggttcagaaaggcgtcgaccttgagtacctgatcggaaagcacgatgccttcttcgcgaattttcttgtgcagtgcttccacgaaagcttcctctgttggcgcaacacgcgccgaaagtagattaaaaagtagtcgattctagcgctttaacatcgcgcgtatatccgccagggcggtattgccgcgaacggctttgacttcggttggtgtgtcgtcgttgccttcccatgccaggtcatccggcggcagttcgtcaaggaaccggctgggggcacaatcaatgatctcgccgtactgcttgc

SEQ ID NO: 125 - DNA, 196 bp, Homo sapien
ctatagggctcgagcggccgcccgggcaggtaaaaaatcagcccctaatttctccatgtttacacttcaatctgcaggcttcttaaagtgacagtatccttaacctgccaccagtgtccaccctccggcccccgtcttgtaaaaaggggaggagaattagccaaacactgtaagcttttaagaagaacaaagtttt

SEQ ID NO: 126 - DNA, 247 bp, Homo sapien
aaattagttaaaaaaatgcattcctcatttgatatagccacattccaaatgcttaaaagccgcatgtatctagtgactaccatactggagagtacaaatatagaactttacccgtcactgcagacagttctgttggattgtgcagcattggacaatatatacagtttgcctgtatatgagaaagagagagagagagagagtgtgtgtgtgtgtgtgtgtgtgaagtgcaataaggctgacaggcatc

SEQ ID NO: 127 - DNA, 590 bp, Homo sapien
cctccacggcatggcgcaattgttgttcaggggccgccaggttgctgcccatgccgatgtagatacgttccacgtgcttactcgccagacgcactcgaagcgtcgccagcgctacgtttgcgcttgctgccactgctgcggcgacgctttttcgggccatcgccggtggcttcgcctttgctgctgagctctttgatcatctcgcggcgctggctgtcgttggcgtcctggtagtcggtccaccactcgccaaggccgtcggtctgttcgccggcgctttcacgcagcagcaggaagtcatagcccggcacggaagcgcgggttgtccagcaacaggtcggcacgtttgccgctgcggcgtggcaggcgctcctgcatgtcccagatttcacggatcggcatggtgaagcgtttcgggatggcgatgcgctggcattgctcggcgatcagctcgtgagcagcttcctgcatggctggaattgccggcatgccacggtcttgcaggcgcatgacgcgtttcgaaagcgcgggccacaacagggcggcaaagaggaacgccggggtgaccggtttgttctgcttgatgcgca

SEQ ID NO: 128 - DNA, 361 bp, Homo sapien
ctgcccatggaaaccctccaggagctgctggacctgcacaggaccagtgagagggaggccattgaagtcttcatgaaaaactctttcaaggatgtaaccaaagtttccagaaagaattggagactctactagatgcaaaacagaatgacatttgtaaacggaacctggaagcatcctcggattattgctcggctttacttaaggatatttttggtcccctagaagaagcagtgaagcagggaatttattctaagccaggaggccataatctcttcattcagaaaacagaagaactgaaggcaaagtactatcgggagcctcggaaaggaatacaggctgaagaagttctgcagaaatattt

SEQ ID NO: 129 - DNA, 546 bp, Homo sapien
aaaaatacaaattcagtaagacttttgctctaacaacaatttttcaaaacgaatcaacaacaaaaaagtatccagtgtttcttttcttatgaagatataataaaacacagtattggtaagcacattttaacagtatgcttttcttttgtagggaaaggagatatggctatgtctaacatcgtgggatccaatgtgtttgatatgttgtgccttggtattccatggtttattaaaactgcatttataaatggatcagctcctgcagaagtaaacagcagaggactaacttacataaccatctctctcaacatttcaattatttttctttttttagcagttcacttcaatggctggaaactagacagaaagttgggaatagtctgcctattatcatacttggggcttgctacattatcagttctatatgaacttggaattattggaaataataaaataaggggctgtggaggttgatattattaatagtgttatgcagaaaatatgaatggcagggaggggcagagagaaaaatccatttcttcattt

SEQ ID NO: 130 - DNA, 733 bp, Homo sapien
  misc_feature (1)...(733): n = A,T,C or G
ggggcctcttcctaaaggcactaatcccatccaatagggcttaacctcatgacttaatcaactttcaaagacaccacatcctaatgccatcacatcagaatttaggcttcaacatatgaattttggggggacacaaacattcacctcatagcattcattgtttcttgttattggcaaagccaagactcacattgtctaagttatttgacttttgagtccgcagatgtgaaaacagtgctaaacagtccagcttcatgagtggagaacagcatttgtgacaaccaccaaagtacctctgtggtcagtgtcctcaaccagggcacagcatcatggaccagagcctctgcagggcacagaggagtggtgaggaacaggggctctggagcaaccccacttccctctgctttgtatatggggggttctgcacatgactgcatttgaaaagggcttcactgcgcttgctgaaggagtgcacttgagctagcggagagttcccagagggtgtctggaagaagcaaaggctattctttgtttcactcagttatagatggaagtcagacacttctgcctgaagtactttcacacactccacagtcttaagaaggatgganaaagcatgccaactactcanaaaaccacaggtgttcaagcaatggtatccttttatncctacaactagtggacaaagnggggcctctgtaatttgggaaagctaggaaaactttttctgggg

SEQ ID NO: 131 - DNA, 305 bp, Homo sapien
  misc_feature (1)...(305): n = A,T,C or G
aaacacatacgaatanttnaactgtgattatgaagtgacagccggctaaatatgtcttgtattttctctcttcctttttttgctaactcatcctttattccattcctgcttccatggtaatgcaggctcaaataaattactaggatacaagattacttcaagcctcttttctgtggaactcataatatgataagcatttgttacaagattgcctgtagttgtttaggggacaaattatattagggaaagaaagtctttctttagttggttaaattttctattataattgggtactaaatttattt

SEQ ID NO: 132 - DNA, 545 bp, Homo sapien
aaacaatgctacactcatttttggcaaagtgctgtattgttcagtctgtgtacaaaactgaccatctatgaaccaatcagtataaaaaatttctataaaaacaaaatttagacagcggctcaagaaaacaagctgccatttatgcatagattgatgtacagtaacctaaccaaatgtcccttttgaattttcaagttactgaaaaaaaatgtgtcgagaaacacattaagaaggcacatgtacagtctacaatactcttcagtctccctaactcatgccctgcccctataaaggaaatatgttcacaattttacttgagaaaaaaaaacaaagccacttaaaaaaaaaaaaacacacacgcaattattaaagttcaaaatctctggaggaaaatacaagcaaaaccactcatacactccaagcctgaaacacacatctaacctccccaggtactggtttggttttcagaggtccacctagaaaacaaatctaaaacttcaggcaaaacagagcaaaactggacatttaacaattacacaattttt

SEQ ID NO: 133 - DNA, 330 bp, Homo sapien
  misc_feature (1)...(330): n = A,T,C or G
aatatttattactaatatcttataatgttttgtggnaccatggcataccttgggtactattgtaacanatagttcaggaaaccctactataaggtttatcaaatggtctcataaacagttacttattcaagcacgccaaagctcagtgaaaagtatttttcacccttactctttctcgtgtcattcaaagagaagttttgatgtagtgtatttatttgtagggagtaatgaacagatccatttcacagtagactttgtgctctaggtgatgcagctaattgccccagtttggaaaacatggacttggatgaattgtcttttgtttgggac

SEQ ID NO: 134 - DNA, 627 bp, Homo sapien
  misc_feature (1)...(627): n = A,T,C or G
aaatattacttcaaatacattttaaagctcaacaaacttgtgttgaactgaattgcagatcctgaactctatttgaaaatacatcatgaaacagaaaancccattccaaatgaaaatgatagtgctttgttgggggtgggaatgaggcggggagactaaatcactattaacagacttcttttcccaatgcaatttgtcaaaagttcaaaagttctgaaatgtactaaatcttaagcaaattaaattcatgatattactaaaactttttaaatagtgcaatgacttatcaagttatagtggctgcattaagaacaaattattgtgtgaaatacctgtataaacacaaaatacaattaaatatttctttacaaaaagctgagcattacgcataatagtggaatgtctttcattaggtgtattttttaaagattaacaaaagtaacatttcctaaaatgtatacatgtgccatatttttgcaaacatgcctgagaatgtatttaaaacatttctgtagtaagagtttgcaagaacttcacaaacctgcaaataaaatgcatctttttaaaaaggtgaaaatggcatctccacactgcaacaattcaaaaagtgcagcatccctaatcttt

SEQ ID NO: 135 - DNA, 277 bp, Homo sapien
  misc_feature (1)...(277): n = A,T,C or G
aaaatcaaatatattatttgttaaaaatcagcttgtttcattacnggaaattacaccagtccgttctatttactttcaaaccatattcaactcctcaactttcaaacatgtaatcaactaatttcaaaagggaaaaggtaccctttataaaggagagatctgttaagacaccaagaaatcaaaattaatatcacttaataattaagtggataacacatgcctcccaatacagtgcagtgagaaacacaaaacatcaattcccgcgtactctgcgttg

SEQ ID NO: 136 - DNA, 486 bp, Homo sapien
aaaacagaatgaattcattgttacagttacagaagtcagaagcccaaatacagtctgcctgaaccaaagccagggtcagcaaggttcctttccactgttttgccaacttctagaggccacctgtattccttggttcatggcccctctcttcatcatcaaataatcagcatagctttatgacattggcagctctgattttgctcttttgccttcctcttatgtagacccttgtaattacattgggtacacccagataaccccaaataatctccctatctcaagattcttaatgtaattatattgggaaagtcccttttgtcatataagataacatagcaatggattccaaggattagtatgtgagtttcttttgaggggctataattaaccctaccacaatatggaaatgtctattgtttttctatgtaccagaaataagacattaggatgtgaaattaataacataacaccacttacggcatcacc

SEQ ID NO: 137 - DNA, 552 bp, Homo sapien
  misc_feature (1)...(552): n = A,T,C or G
ccatcttgcatcaaatgttcttaaggcagtgactggctatcaaccacagtttctgtctccccagttgcaaacacaggatccatgcaacagttctgagaccatacacttagaaaccacaggggatgcggatcaaatgcagaactcccaaattataaaacagtcaggctacactcaaaacaaaacatagaacatcaacaacacacatctcccaaaaaagaagtgcaacgcatgcttgtataaaccaacaataacaaaaaaaccacaataaaaaatgcagagtctcccaaacaagttttcaaatgtattgcanaaagaaaaaaaatgtatatatatataaaattaaaaagtctgaaatactagtgcatagtcaattacctaacaccaagtttcttttctttctgtccaagctctactgcccctctgatactagcagcatgtctacaggctaagaccatagcagcaaaaaacgtttttcatttggcatttacaaaattaaattactgaataaaaatataattttttataaaactatttcttacagtaataattttt

SEQ ID NO: 138 - DNA, 231 bp, Homo sapien
aaattttactagtgttacttaatgtatattctaaaaagagaatgcagtaactaatgccctaaatgtttgatctctgtttgtcattactttttcaaaatatttttttctgtaaagtataatatataaaacttcttgcttaaattgaatttctatattagtggttaattgcagtttattaaagggatcattatcagtaatttcatagcaactgttctagtgttttgtgttttt

SEQ ID NO: 139 - DNA, 535 bp, Homo sapien
cagttgccaaccctctgaaccgtttaggccggttcatcgctgcctttgaatctgggccggtggtgatccggcaaggggtgaaaccaaagagcgggggctgtgaggcccttcgcagtccctcgtaagtcgctgcgatggagtgaactatcacgcatcgtgtttatttcgtcaacacgaaatgtgatttatttttgcgaattaacacggcagttctcggttacgttttcggaaagcgtgggatatgattctgtctatcctgtacggatatacagtaattaccgggaggggattccatggcgaagaagcaggcggcaccggcagcacggcaggaaatgagcggtatggcgcgcctcgggcttcgcgtctcatcgatgattaatcacccggtcgcccagacgcagcgctgggttacgattcatcgcctggacacggatggggatcgggagtgggaagaggttctgagcgtgatcgctgataccgacgagctcgagctgacgctcaatgacgatggcagtgtgacggtgaggtgggagca

SEQ ID NO: 140 - DNA, 640 bp, Homo sapien
  misc_feature (1)...(640): n = A,T,C or G
acattggtggcacttgaactgagtgcaaaccacaacattcttcagattgtggatgtgtgtcatgacgtagaaaaggatgaaaaacttattcgtctaatggaagagatcatgagtgagaaggagaataaaaccattgtttttgtggaaaccaaaagaagatgtgatgagcttaccagaaaaatgaggagagatgggtggcctgccatgggtatccatggtgacaagagtcaacaagagcgtgactgggttctaaatgaattcaaacatggaaaagctcctattctgattgctacagatgtggcctccagagggctaggttagtacaaactcgcattcatggcttggtttcccagaagatctccatttaacttttttaaagaaagtttattgctttctttaacctgcattttttctaagttttttttcgcataaaggtgctgtctttgtggcaaggcctaggcatgacaatcggaggactcgagggggatggaggactagtgatccggctggctgcttccagtcgattagagaggtgaaaaagctgaacgtgtgcccantnaatcttcaaaaaggcagaaacatatcaccttntgcccccntaaacttgttctttttccgaaggggaaaaaaaaaatggaaa

SEQ ID NO: 141 - DNA, 127 bp, Homo sapien
aaaaatcacacactgacaacacagaaatacgaaatgctaggaaaagtctagcatatgaaggaaaaacatgtcttatgcactctaatataattttttcaattagtataaaggcaaatgcggttttttt

SEQ ID NO: 142 - DNA, 126 bp, Homo sapien
  misc_feature (1)...(126): n = A,T,C or G
aaatatcctctggatgcnttcaagtaatactaatcatttcatgngnaaaagtcttttaataaacaaattcagagtaaaattaattgaaatatttataatacatttgttacacagttatttccaata

SEQ ID NO: 143 - DNA, 730 bp, Homo sapien
  misc_feature (1)...(730): n = A,T,C or G
gcaagttctggagtgttcacttctgagcctgaattccctcccctgcaaaatgggggaataccctcctcagagggtccctgcgagggtgaggggagatcagcatggcaggtgtgctgggcacggcagggcctgggaagggcagatcctttccccatccctgccacaaacaacccaaacctttaaaggagagcaatggccttgtgtcaaaaacaaaaacaaaacaaaaccctgtcctaggagactggggccctaatttctaatagcaagcctttatgagtccctaacactctactgggctgagtatctcacacgccagaggataacctgccttctgctcaccaccaccccgtagtagttgtcattgtgtccatttcacagatgaggcaaaggctcagaagagtcatgtgttaaaccagcttctagagcccatgcaggagctgcaggtggggagaatcacctctaggtgctcttcccatggaatcctcaccctccttgagtggtcactcactcanctttccaatgggtgtgtgacctttgaccagctttctttccttntctgggcctcagtttcccaccttggacaaagtaagaggtctcttgggnttcanggtagttcttcctaacttcttttccttttcatttgagcatccttcttcattttttgccacctctcttgtcattacangcttttaccttcggccgcgaaccacgcttaagggcnaaatttcca

SEQ ID NO: 144 - DNA, 485 bp, Homo sapien
ctggtcagaaatgattctcttgtgacaccatcgccacaacaggctcgggtctgtcctccccatatgttacctgaagatggagctacctttcctctgtgtggcattttgtcgcttatccagtcttctactcgtagggcataccagcagatcttggatgtgctggatgaaaatcacctgtgttgcgtggtgggtctgctgccgccacttctaatcctcatcatgacaacgtcaggtatggcatttcaaatatagatacaaccattgaaggaacgtcagatgacctgactgttgtagatgcagcttcactaagacgacagataatcaaactaaatagacgtctgcaacttctggaagaggagaacaaagaacgtgctaaaagagaaatggtcatgtattcaattactgtagctttctggctgcttaatagctggctctggtttcgccgctagaggtaacatcagccctcaaaaatattgtctcaacag

SEQ ID NO: 145 - DNA, 465 bp, Homo sapien
ccaagacagctcgtttctggagagtatgagggtgtgttttcttattgtgaaaggaactaccttctcttagagggtaggaagaatgtggtgtgtgtgtgtctcataaagcaaccggacattataggtgcccaggtcatctataaaaacgatccttgggctgtgtaaaaatgaagtggcttttcagtatcctctttcacacttgctgcttcgggagactatgcaatgatgggaaggtgattgcccctttatttcattcagtgccatggtccctgttgttgtagtaatttatttgtttagttcattttttttttcttaacagtcaaggggaagagtgattcctcacactgctttcaagctggactgagccagtctcattctgggaaagaaatgctgtgtccagaactcagcagctccatctattttttccagtcgaaagaaactgatctttaggcagtttttacttgg

SEQ ID NO: 146 - DNA, 351 bp, Homo sapien
ccagccggggtaatctgtatgtggcggacttgagctacgacgtgggcggcaagtgcctgtttgaccagatcagcggcgtgaagcttatgccaactcatcgtttgataaatccgaggatcagttcaagacgtcgcagcgggtgattttgggaacgtcgttttcggtcagtaaattgtgggtagcgacggagtggttgatcggcaagaatgatccgtatattggcgggagcagctataccgagagcctgggggctggggggagtaaccagtgggagaatcagttatatatgaacattgggtactacttctgacttaagatctccagcgttttaactggccttatcgcaggcaa

SEQ ID NO: 147 - DNA, 654 bp, Homo sapien
acttatttttaattactgaatatttcttagacgttttgggacagattttatgtaatctttataagtatgatttctgaagaaaagcaaatgcattagtatgtttgccttaaacttgtagactaaaccaagtattgtaaaataaacagcgataacagtgatagtttttaactctatggtcattgtatcactctggaaaatgtggagtagctgtaataaatctactcctgtattatgctttacagtgcaggtcttagtttttcttttttctcatttcttttgaaatggcatctcgaacaaagtccaccaatccctttacaaaagaatgaactgctcctctgtgtgtacttcatagaaggtggaatcggacagaggcaggttagtgacagttattcctgaaatacaggagcagagtacagtctgttgtggtttcccggattccgcgcctagctcagccaattaagcatgagacataggccattgagccacttagtagttatgcgagtggatagattggtatgtaagagggaaagaggtctgctgtaaagaacaacacttgtttgtctgtggggaaagaaaagcagaatcttgagatgaaagttggcatacaaataggatactatcgccagtaggttatattacaaaacatttatcggg

SEQ ID NO: 148 - DNA, 539 bp, Homo sapien
tgaatatcatgagggtgattttcacctgattgcaaaactgccatagtttgaaacactttttcaatttaccagacacactctgtcaagacttcatatacttccaacttgcaagcctgtgttttgccttctccaacctaaaaaggaaaagctttaaacgatgaacttacattctattaaaccatcagacttgagcttatccatctgtttagcgtgaatgtacaaaccaggtacatttccaccaaacacatagaaaaatcttgtgcatcacagttcagctaagggtagtaggacaatccttacaatcctccttggatttcttttttaagatgtcaaagaagcaggtaagcaacattgttcatttgttactgggtgttctagatcaaaccttcacaagctatatatatagcttcatatgctatagcttacaaatggggtaacaaagtaaaagaaaagaacaaattatactttgacactttatagtcaaagtataattaaaaaagaaatcctacagtgggtaatggagaaatagataatttttc

SEQ ID NO: 149 - DNA, 273 bp, Homo sapien
tttttggtcattctcctcaaggagccgctggatagtagtcttgattgacttccaccttgcccctcatacagtccggtactaaggccaccgacatcccgaggaacctccggaaccacgaccgccaagcaactcgacccacgataggtggggcctacgctctcgaagttgattggatgctcccgcctacagggcggggtacagaagggacgtcatttgtgactggacgcgcaagagctatactcagcagctttcctctgtcccagcccctagaac

SEQ ID NO: 150 - DNA, 200 bp, Homo sapien
gtttttactaccgtatggcccatttaaaagggatgtgtacgccttacactataacccttaaaccacctagaaatatgaaactcaaactgccactgacctccctcaccaagctccataaaagtaaaaaattataacaaaccttattaaccaaactgaacgaacatatgggcgattgattcattgcccccacaatcctaggg

SEQ ID NO: 151 - DNA, 515 bp, Homo sapien
ctgtagcgatctttaagaatattttatatatgaaatctggatttagggttcccatggtctggcaccactgggtacagtagttctacatggcagtaattcattggagttgaagcagtgaggaaagagtcaagtactagtcttttatcctcagtgtccagtgactgtcaagagaaatgggactgccttctgcattgggatatgtgggttaaagagtagtccaatatagaagagtgagaaagtgmaccctctgaggcatagtaatgttttattkraaaacatctcacatgtattgaatacttasataggatgtattctgtattactgaattttccagattattgaagcaatcacctttctgtgtttaaagttttagaaagaatgcttttaaaaatgcttaacataagataagcctgttttcatggtgcaaggtcctttctatgaacatgaatcactggactctgagggttggactaagatcacatctacatcccttttaaatgactagtgtgctcaga

SEQ ID NO: 152 - DNA, 243 bp, Homo sapien
atttcaacaacatacttgtcgaggtagttataaatcttcttagggggaggtggtggtttctgttggaatgccaattttacagcttctgctgctgattcaggttctttaattatgcttttctttgagtctgcttcagatagcacaacaaaaaaatgatgacacttttcacacttgacaaaacgggtggatgatacaaaaggtctctacatgtgtgcacaagtcgccacatttaggacagcgcag

SEQ ID NO: 153 - DNA, 620 bp, Homo sapien
ttgtcttctctaccttaccatagccagttgctttcattttaaaccagagcaagtaacatattagtgacttgaatcttcataagttaaagtaaaaaacagcaaaaaacctagatctttgtcttttagaacacagaccattttcaggaaagcagttagctaagtgtttaattcatgaatattgtatactgcatcccctaccacaatttacacaatcctgtggatagtcctacctcaccctggtcaacctacatgatccttaagctaatggcggatcacgatgaccttgtagacatgcacacaactatacctttgtccaacagatcataatatatctgctatccaactggttttacctgcctaatcctactgatttgggcactgcttgtatagtctctcaagttcacaggaaatgttgattttctaaggtcctcatttttacagagtatacaggcaaagtgacaggggaaaaggaattagtctaagagtaaggggatgattattatattgaggctaaaaccacaaagtggctcaggctttaaaaaaaaacactgtggataatgacaaaaagcataagtaaaaatattttgagaaaaataaagtacaagttttgaacacccccc

SEQ ID NO: 154 - DNA, 843 bp, Homo sapien
cattgttagtgacccaagtaaatttatagtttttaagttcagaggaaaaataaagcctattttttgttaacagtcttaataaataataaaatggaataaagaaaccaaaaaaaaaagaaaaagtttgtatgaaaattcatccctatttctttattttggactaagtagtcaaatttctactatattaatattatgtaagcgacacccatttaaattcactctctttgatagaaaggtgagttgattatcacacctgctattttttcactgccaaaragactgcaataacctccctccatcaccctcaaaaaacaaacagaaaccatctgaggcatagccattgtttacatattgtgtttgtgtgcacctatctacaacgttctttcttctaaggagtttatctgccaatattttcggcttcagcagcagcgctcttcttgacagactaagagaaggatctacagaaaagtcatctgattaaggttttgggtcaaattaaaactctctggacagaatcctctttccttcacttggatttctgcaaacagaaagcagattattctcctggcacaatagcgactctagaaacgcttatgtttttcagactttggcagaacttgttaagaacagcatcatcataatacatttgtacaaactcgaatttcagtggctcttttgtcccacatgatgcatgatgaaatttataaaggtctgttttacccccacagggtcatttcttttgtgttcctacagagccaataggcttcatttaagtccaagttattatattaaccatccctttcactagactagagaacttctttttcatggtccatatcgtga

SEQ ID NO: 155 - DNA, 674 bp, Homo sapien
tttcgtgtcagccccaggtttgctccagctattcacaagcagaatataacacaagaaaaacaattcatatcccttagggaaaaaagaggatcaattcatcactcaatatttaatacagccaaaatgagctgccaaaacaagcacacacacaaatactgtgaacagaaaaatacaagaaaatgactaagctgggagtcttgacggggtatggacattgcttaaagcacttatcagtccccagaaaaaccaaaccaaaaacattttttacgatggcatggcctcatggccccctttaaaactgttgatggtaacaaagggcagggggtggggagagaaaacacaatcactgctccctttttgctcgccagtgtgactgcacccctcacggcaccggcatgtacacaactaccacacaaggaggaccaagtccctctgctggtggcctcctaaaaggcaaggcttgagttttggctgatgagcaagttctctccgttaccaatccctgccaaccagcactaccatggctgaattgatctaccgttttcctgagtaaactgtaactggctacagtttcggtaacatggaaaagaactcagctactacagccaactgcaatacttcaggaaccccctccatccctggggctcctcactcctagtgcatcttgattggat

SEQ ID NO: 156 - DNA, 671 bp, Homo sapien
cctttagtgaacacctttatctccatgtccctcttagagcccagagagctgcccataggcattttccagaattcctcatgtcacctagttcaatttccattaactcagatcagccattgtgattcaccatttgtcaggctctcaggtttaacaaaacctactatcaccatcatccttcaacagccacagtctgaattgagccaacatttttttttctttgagaaagaagtgggctggggcacaacttttagtctgaggggagctagtagtcggcttgacaattaaagccatccataacaacttttcctcaaatgtgttgactcctcaggggctaaactgctcttagcttagaattatgctttactagagatctaccatataagtgggttaatcactaccatcctgtaactagttatatagcttccagacatgagggagacatcaaacagggatggaagcaaccccaaggatatgcaagaagggcatgatgaacccccttccctctggcaggagaacaaggccaaccaagggacagactggaaagcacttagatgtttaaggaggagaaaggggaagctttgaccagtccttgccttttgccaagttcagccagttctccgctgcttgcaacctctagcgcagtaacattttgcagaattgcagattttccc

SEQ ID NO: 157 - DNA, 474 bp, Homo sapien
cgcgttctttaattctttaagcctagaaagtcctttacactacttacctaaaggtcccaaagtaaaacacacactagtagtaaggctagtgcatttcccttctagcactcaaagaaagcttaacatttttgacagtttgcaaataccgccttgtatttctgattcagccttattcaaagtatcataataaaatatttattaaatstatgttgatctgcgtgcatttatgatctccagattaacgttaggcttctctgttgggccctaacttggaggtgcttttttggatccctcctcccgtgattcattgtaatttcatttcccttgtcatggctctgaccagagaagattctaaatatctgcccccaaagccaaaattatatcttttgaaaagtgaaatgaagagttgagtcastaatttattttagatattactgcctaaaacaattccccaaaatttatggaagttggagg

SEQ ID NO: 158 - DNA, 584 bp, Homo sapien
ttggattctgcagttccacatcattcactccggcaaaggagagaacttgtaacaaagatgagtgccaagtttagtcaatttaccctacctggaatactatatacaactctgggtctcatgtgtgttaaaatacatacagtgaagctgaggaagagccactgaagtaaaaagtattgtttacaagttggaaaggatgtaaaaataatctaaagtatactaagtcaggaataaaaggcagagttaataaaattgtggctggtactgatagacgaaacagatatattttctaaatcctggaataattattaaaaaattttacatgtatcaatggattccagactccatattttaagtttcacaactactgtcatttaaaactataccttattgaacgtctcccactctcaataaattaccccaaatcactcttctccaaaacgtaaatttggaacacactgacttacaaattttgggcttaatttataggatgttgtggccctcaaaaatatcattgtgggctaaacaaaataaattcttgaaacaattctaaaaatcaatcattgtccaaaatgaactttttctaa

SEQ ID NO: 159 - DNA, 671 bp, Homo sapien
cctaattttattacttttcttgccactgctattattgatagaaatacaattaaataattaagatgaaccaatccattggaagattactaaaattgtatcttcccaatgcctcctacagtaagatttctttataattataacccttggagacaatttgaactttatttaaatgttctgctcaaatctaaatttccttctcctaggctgaagcctgatctaaataaggaagtagttgggatatatccacaggctgtcgaacatggagctgcatctgagagacaggtggcagcaaccaaaagcaaagcagggactgagaacaggcaggttccaagagcaaaatggaacttgaaagccaagtatggttcactgtaaaggagaaaatatagaaatacggaactagaacacctggtctgggatgtggtaagcacccaaaatataggaaaactgtatgaattcttgtgaagcagtaaactatgatagtaatcatgtgacacatatgataacaaactcaaaacagggaaaagaggggctttattcaatgctggagataagtgaaaaaaaaagtgaagtgtctcaaggacagaagttatcatctcaaaaaggcatatcagctagatctcgcggaaaccatatgattatcataattctagactctgttcggtattacaaag

SEQ ID NO: 160 - DNA, 315 bp, Homo sapien
ccagagagggagggctctgcttcaccacagggcaccagaagaggactggtgcgcgggaagaccaggtaatcataatgctattaaaaatagcagtaatcatactgttttatacattgtataatgtcataaggattttaactttcatgtaacataattgctgtaaaagtttccccagtttgttttgtgctatttaccctggtgttaaaatgtgtaagaatttacattttaggtatgttaggtttattcctttttatatggtttctgtttgaaattttgattttagaagacattcattctcaaggtcataaaacacac

SEQ ID NO: 161 - DNA, 607 bp, Homo sapien
tttytgtgtcaccttggataattgcttaacttttaaaatttacgttccctcatttccaaaaagggattataactcactgttattttgataattgagataaatgtacgtacaagtgctttgaaactgtaaagtgcattataaacagagggatttaccatagaggttctaccttgatgtatcaagagaagccttttctggaatctggtgcagccttgtgagatgctgttaggtaaggggactccttggtagaatttcttacatttgtgtaaaaagttctggttcctgagtaattccaaagaagatgctatgaggagttcactgtgcctttgatttgatcccaatgggtcagaatatgttttctcattcagtaggctactacaggatttgaagtagaaaaaacagggtccagtgaccttcacgggatcctagatgttcatgaatttcaatcatttgagattgtggggtgtggtccaatgctgctctcaaaaagatgttgcctttcttcasagagcattaataactaaaaaatcccctggtcccaaatttattgtgtgtmtctgaaggctttaactgaagaaatgaaawgcacactcatggaacaaactaa

SEQ ID NO: 162 - DNA, 443 bp, Homo sapien
tgagttttgaaaaagtgaataatcaaaaggaaaataattccttgttgttcataaattaagcatcactaaagtctcttgaaaggcatttctgtattgggcaagatttaaaatactaaagccttaggtcctattcatatttaaagtagcatgtttgtaacctgttactatttggagagagaagcagttgcctgccacaattgaagactacctttcaaatagcaaaagagagagagaaggctgatatttcgggcttttaaataaagatttgtgtggttctgcttttactgtaactgtcactttcccagtgaaaatgatttcatatacatttgagggtcttacasgtatgggtaaagttctataaattgcaacaaaatgatacccaatttcattttatcctttttgtattgtgaaactggaaactttatgacattgtaaattatcag

SEQ ID NO: 163 - DNA, 686 bp, Homo sapien
caggcaaattatagtcaaatacatcacccccctcaggcatctgtggcaaggcatccctctagagaacaactaattgattacttgatgctgaaagtggcccaccagcctccatatacacagccccattgttctcctagacaaggccatgaactggcaaaacaagagattcgagtgagggttgaaaaggatcccagaacttggatttagcatatcaggtggtgtcgggggtagaggaaacccattcagacctgatgatgatgtaagttagctttgtatattcttgaaacacctataaagttttatttaccgattgaatacttaaatgtaagtgaaaatctaatagatgtttatgtaaatctaggtagacatcacctggattccccactctattgcttacctttttgttttgtaatttgatcagttcaagttaaaacaatttaaccaaaaactatgaatgtttatgatataatgaaatgattgttaactttcttattgctttttcacacacctataaaagtaattttattactcccaagagaaatcactaaaggcagaattactagaggtaaaaataactagggttggtacagtattactcaggagaagtcaaggggagaaaacttgtcccaatgattcaaaataattttggcatggggggggggagggaaaaaaatttggcttccttt

SEQ ID NO: 164 - DNA, 706 bp, Homo sapien
ttttttttgtttcatttgctgcttaaaataaaaattataaattagatttaaatggagcactaattataaaacagattgcaagtaccaccatttgaaaaaaaaaaaaaaaatcagtggatttccataacacagaaaatgcatggacatgcatctacagtagagttaaaaatttcctgtgactaaaaaattaaaaactggaatcaccagtagcaaatgtatagtcaatggctatgacaagaacagatcctgccgagctcataaatgcaattattggcttttttgctttataaaaaagacattacatattttattgcattattctcctaataaaaaacatactaccacgtagctctccccatccccattctttgcttccagatttttatagaaaataactgttttagtctggccttggaaagtgaacccaccagcaccaccttcacctactcactcttcaattcaatatgcacatagcaaaagccaacacttcaaatctcttgcccacatcaaaaaaagtagtttcaggagaaaaacattaataccagttgaataaaaataagggcataaaagctatgagagagatagctctgccatctgtctctgggctaaaaatcaaggctaactattgcctttggcaccacaaggttcaaggtccatggttttattagaaaagtccccacaaaaaaattaaacccccctcacccca

SEQ ID NO: 165 - DNA, 427 bp, Homo sapien
tyywgggcaattaggcaggagaaggaaataaagggtattcaattaggaaaagaggaagtcaaattgtccctgtttgcagacgacatgattgtatatctagaaaaccccattgtctcagcccaaaatctccttaagctgataagcaacttcagcaamgtctcaggatacaaaatcaatgtacaaaaatcacaagcattcttatacaccaataacagacaaacagagagccaaaatcatgagtgaactcccattcacaactgcttcaaagagaataaaatacctaggaatccaacttacaagggatgtgaaggacctcttcaaggagaactacaaaccactgctcaaggaaataaaagaggatacaaacaaatggaagaacattccatgctcatgggtaggaagaatcaatatggtgaaaatggaaaaa

SEQ ID NO: 166 - DNA, 124 bp, Homo sapien
accatgttttcgttgtgtgtgagcagggaagggaactttcctgccttatttaaacctgggccgaggattcgtggaatctgcttgatcagagactctgaggccaaaaacgcatcatacttcttgg

SEQ ID NO: 167 - DNA, 232 bp, Homo sapien
tctgcatagcaaatatgatttaagaatttaacatcattatttgatcacaagcgtaaatatgtcaccataaataaatgtaaattcattgtacaaaaattcccaacaactcttaatacaaatatggtacatttgacagtttctgaaacagattatttttaaaactttttaaaacctaagctttatttttttcctggttattagacacacacaaaaaaaataaaaagaggctggg

SEQ ID NO: 168 - DNA, 677 bp, Homo sapien
tttcacaattaaccaacatgcaaaaattctcagactaaacactgagaaattcttcatacaatgcatttgccaccttattgcatttttaaaatctttattctatagtgaattggtattcccaatctgcctaagcaaaggcatgcccttctaacaagatttgcttagagcagaggtgatagaaggaagaatccgaagaccctctggcatggcaatctgggagcagcacattgttgatggagtccaagtgagcacatttcacacaattcatttagtgacaagtgggcttgctcccttttcatccaggaaaaaaactactcacagaccactgcccagaatctggaataagaaccctcattttaaggtattcttcccaacaaataaatatctaaatattgaaagggggcatatcagaaaacttaaaagacacaataaccaaaaccaaaaccctcttcaaaacaagtaagcaatgtctgtatttagttcactctaaaacattcttagcttttcttgcagtttgttcctaaaagatttgattgggcacaagaggaacgaaattattaataaaataaaagcttatttttgtttttgctgtggataatcggtacaaaacgtttccagatctgagacttaaatggatcttttaaggtgaaaaggagaatgccaggttctactgaaat

SEQ ID NO: 169 - DNA, 635 bp, Homo sapien
ttaagaagactgggcatttatactctctcttgctagtcagcctggagcaagcttggagcagacgcacatttttgtactggcacatattcttagacgaccaattatagtttatggagtaaaatattacaagagtttccggggagaaactttaggatatactcggtttcaaggtgtttatctgcctttgttgtgggaacagagtttttgttggaaaagtccgattgctctgggttatacgaggggccacttctctgctttggttgccatggaaaatgatggctatggcaaccgaggtgctggtgctaatctcaataccgatgatgatgtcaccatcacatttttgcctctggttgacagtgaaaggaagctactccatgtgcacttcctttctgctcaggagctaggtaatgaggaacagcaagaaaaactgctcagggagtggctggactgctgtgtgacggaggggggagttctggttgccatgcagaaagagttctcggcgggcgaaatcaccccctggtcactcacatggtacaaaaatggctttgacccgctaccgacagatccggccgggtacatccctgtctgatggagaggaagatgaggatgatgaagatgaatgaaaaaaaaaaaaa

SEQ ID NO: 170 - DNA, 533 bp, Homo sapien
ctgtgatctcacaagtgtgaaaaatcttatgaatgtaaaatgtgtggagattcttctttgtttttagcttccactttgggaacatgtcaaagcacacattgagaagtcccatgagtgaaagagatgttggaaagcccttgaacttggtcgttaggaaacatccacactgaagaggaacctgactgtatggaaggtcaaaaaggctgtattaatttacatgcaaaaagtcacactagaggaatgccatatcagaatgcttttggtaaatatacatgttttaaagaggttatatatcattaataaaaatatctagctggtctgaagaccctgagttatctcaattgttcacggttacagatggaactctttattattgaggagttccactctttcccccatttgtcactactacacttccctagtctttaaaacaattttaggctgggtgcagtggctcattcctgtaatcccagcactttgaaaggccgaagcgagtggatcatttgaggtcaggagttcgagaccagcctgga

SEQ ID NO: 171 - DNA, 568 bp, Homo sapien
cccttgscaaactttcccttaagtattgcactacaagtctaagacacttttcactcaaagttccttccttccttacctctcttttaacttggagtcagactttcatcagtctgacaacttctccctgtctccttccttttccccccttcacaagcatttcacctaacaaatttcttatgtgcttaatcccctcttagaagcagatgccaagatgggattaagcacataagaggtcctggactaatacaatgacaaaggctccccttgaagcatcacactaaaaggaaaaaaaaaaaaaaaacctagccattttacattaactatttctaaaatatagtatttgcttccctatttgctaaaacaaaatatactaaacatgactattccaaaaatctgtagggtactaagaatatgaagagattcactctacttcaggggatggagttgtagtagaaaaggctttgtggagggagggtggtgtttgaaatgtactttaaaagccatcctcaaagcctcgagggctatacctggcctggtgattatccaaggacagtccattcaaacaggg

SEQ ID NO: 172 - DNA, 167 bp, Homo sapien
ccatttacaggaatcagccacttcagttcagacagctttattaaaccgcctggagcgaattttcgaagcatgttttccttccatacttgtccctgatgctgaagaggaagttacttccctgaggcacttgctggaaacaagcactttgccaataaaaacgagagagg

SEQ ID NO: 173 - DNA, 391 bp, Homo sapien
cctcccaaagtgctgggattacaggcatgamccmccmcgccctgatgatagacacgtttttaacttctaaaaatatatgatcatgattgtgtctgtggagacttgcacatatactaaattttaamcaattagagatatttgttcattaccacattttgggagtcattatttcctctatgaagagagaaaggaatttgatacaagttcacaggggcttccagtagattgagacttttatttctagctgagctgctgatgtatgaattttttttgktattatgactttcatatgtattaaaaataaaatgaaaaaacaagggattaggtgaggaacctatacgtctctaatatgcaaaataccacagaaataatgactgktgggaaaattagg

SEQ ID NO: 174 - DNA, 474 bp, Homo sapien
gaactcagagagaggattgtcacccttggcatctgagctgacactataaggacaatgaggagtctccttggggatagatggggagatggaaggacgatgcctgtcctacggggtcttggaaggttagggatacacactgtgagctgccacaggctcaacagtacggatagggggtgctggaaccagccagggctctgatcaccaagctatgtgccccatgcagaggaaggggtagtggcacactgaaccacccagccacaaggctatctccccatacagggcacctttaaaaaaattatccttacaggggaagacggggaggaaggatgaactgtgtgcggtgatgttgcagtgagtgtgagtttgtgtccgtccgcttgtatgagggcctaccttttactaactagcccccaactttcattatctcccctttttctgtctacccttctgcctttttaaagtggcttgcaatcc

SEQ ID NO: 175 - DNA, 655 bp, Homo sapien
ccttgcaggggtggggatgtgtgggcttgttcactgttacagcccatgtatacctgaagggcaacatgtacccacaaatgttccaggaggtaaataaaaaatacaattcagcctcttctaaaccatccttgttgatatctctgctacttccgaaagttaattcgttatttggactccataatttttcctattaattcaccctatgtccaactccaacagtgaaaaaaatttatttaatctttgcaataagcctataggcaggcagcattatcctcagtctgcagataagctaaggctcagagaagcttgtatactgtcacttaggtagtaattgcaagagctggcattcagacccagactgtgggactcctcactccattctctttccccccactaggctgctccttaaaatacaatggatgcttgatgaacgcttgtgggaatcctgggtggacacagttccttttcggccaaaagcaccttgacgacttgtgaagaattaatctggaaaacttaacctatttataaaaacgtgttattaagggcaggttattcccaccccctttaccaaagaaacccgccctgacctttttttactgggggttggtcttgggcattttcaacaaggggggaacagtttaaaaattcccccctt

SEQ ID NO: 176 - DNA, 660 bp, Homo sapien
cctggtcaaagtgggcattaccattcaagcattactagacatcaccgtaacgaaggctctgttcacatgaaactaccccttctccattgggggctcagactctgctctcatccaggatcctgaactctgctccaggcacctgttcaaccctctctcccacccactgcctgtcacttcactgactccagttacattgaaacaattttcagtctaagggaggattttctacctttcagagctgacctccgactttaagacttgacaggtatttatcttgaaaccagagagggagctggaggaaaaaaaaactgagcaagcacatcaatgccttttccacccttcttcatcctttccacactcaccgactgccattaccaaaacgccaagcacaaccggtttggaacaagacgcattccgttttaattaaaaccaactcattatgtattttagtgggggggaaggggggcacaatcagggttttcaccaccaaattttccacacggtttctgaacaccattgccttttaaaaaactatttttccacctccaaaatatttatttaaattttatttattacggaggtggtattcttcctttgggagccaaattgggaaatttagggaaccttttttattacccggttttttgggcgggtaaaccc

SEQ ID NO: 177 - DNA, 459 bp, Homo sapien
ctttttctcttcctctgtggaatggtgaaagagagatgccgtgktttgaagagtaagatgatgaaatgawtttttaattcaagaamcattcagaamcataggaattaaaacttagagaaatgatctaatttccctgttcacacaaactttactctttaatctgatgattggatattttattttagtgaaacatcatcttgttagctaactttaaaaaatggatgtagaatgattaaaggttggtatgatttttttttaatgtatcagyttgaacctagaatattgaattaaaatgctgkctcagtattttaaaagcaaaaaagggaatggaggaaaattgcatcttagaccatttttatatgcagtgtacaatttgctgggctagaaatgagataaagattatttatttttgktcatgycttgkacttttctattaaaatcattttacgaaaaaaaaaa

SEQ ID NO: 178 - DNA, 720 bp, Homo sapien
ctgcaagctcccactccttccatttatcttaacgcccaggctgacttctaagctgcttttcactttcctacctccactgcattttcgcccctgataatttttgtaagcttacctaagcctcccttcttttgagatccccttcttaaaagggtccattctattaaccctaccccatatccagttacttttactacctgctgatctatcgctaccttgtccaattcatgggaattacagggtgcactgggacaagagtaaaatgatccaacaaacataatgttgcatttaaaaaaataagctaaaagatactgatgactttttataactacaacatattcgtttgtgaataagaacatatatagtaaaaagatgaaaatgtgaacaggttgactatttcctaaatttatggcagaaggttgttctggagaggatgggaagaaaaaatgaaggctggcagtgatgggtggggaaatgcaacctccaaaattatctatctatatatttttattaaaaacacccacagtaattatggcaaatgttaatggtttgtttgttctaaggttttggatacatttaagatctcttgctttctgggtaccatttcttttcttttcttttctttttttttcaaattaattccaaaagacttatatctgctacatgaagaacgaagcaagttcagctctcttggctgaaatgttcaaatgcttgagggcaagg

SEQ ID NO: 179 - DNA, 427 bp, Homo sapien
ctgtgaatctgtctggttctgaacttattttttagttattggcaatctttgtattactatttcaatctcttcctggtttaatctaggagggttgtatatttccaggaatttatccatctcttgtaagttttctagtttatgcacataaacgtgttcatagtagccttgaataatcttttgtatttctgtgatatcagttgtaatatctcccatttcatttctaattgagcttatttgaaacttctctcttcttggttaatcttgctaatggtctatcagttttatttatcttttcaaagaaccagctttttgtttcatttatcttttgtattgtttttgtttgtctcaatttcatttagttctgctctgatcttcgttatttcttttcttctcctgggtttgggtttagattgttcttggtttctct

SEQ ID NO: 180 - DNA, 728 bp, Homo sapien
caaacacaaaagtcactgtgtgtgtgatgcttctccaattccactcatcctggctgccattcatgcactagtgcatgtatgcatttttacattttttaaattacaaaaatcaacctattataactgcttagatatatatgaagtaaaaatgaaagttctccctttacatgacccatcccccatcatttccctctttatcttatactgtcagcattcccagcttgtagcacagtgtctggcaatagtaaatcctcaaaaaatgatcaatgaataatttaataatgattaataaataaattaatgatgatggtgaagataaattttagcatttattgaacgctaactacaaaccagggagtgtggtaaatattttataaaaatcaatgaatgagctaaaatgccattctattatttttttggatacggtttaatattttactcataaatatgcttaaagaatattataattatatgacttagaatggtaaaacaatatgtacagcagtatcctattttttagaataaaaatataaatatgtgctcacatatgtggttggggcatgcctagaaacccgattagaacgggattttttcttaccaccattttttttacctgggaaaaatatgggaaaattttatttcccttctttttggttctaaaatttatatacaggagcctatttggctttggataaatcattttaaaaaaggtggtttaaaaaaaaaaa

SEQ ID NO: 181 - DNA, 546 bp, Homo sapien
acaatcctttggaagacactactgggctttgggtgctgctttttaataattgagttattttgagcttgccaagtaggatctattgcctggactaaaatttatttcctaatcttctgatgaccaagaaaggaaaaattaagtttgcagatgggagatgaaatatagccagcgaatatgcatactggttctgaatgaaaggaattaacttttcagtcaagaaacagtctgcatgccgtaaattgaatttttcctgcaactggaatgattggttaattctttttgaacactggcctttctccccaagaacactaatgaattgctaatattttttaaagaaaactggttttttaattaggtaagctccacttcctcttattttttaatccctaaagaaaactgttaaaagggaatggatctatcacgccttttcttttaaaaccacctttttaaaaaaggatttttccaacccccaatttgctcttattttaaaattttgaacgccaaaagaagggaaataaaaatttttcccttaattttaccccctta

SEQ ID NO: 182 - DNA, 333 bp, Homo sapien
ggccactctgactgggtctgctaattcacatgctctttgtgacatacggctctaagaggcagaggctggaagagaagtatgtgggttgtgggatcaagatacccaagtttcagtcttgacactgctattacttagtcaggtgaccactgtaacttcatcttgattgagcctcagatgtctcacctgcaaaatggagtttgaaatttgctatggttgggtgtcacacggattaaatgaaataatgcctgttaagcgcctatccagcacttaataagatggccactgcatcataatgctttgggcacaagtaacacaacatccaacccaaagggg

SEQ ID NO: 183 - DNA, 393 bp, Homo sapien
ctgaatttcttgggctttatgtggcagtgtggtaaaaatatatgatcagatttcactgttaagaaaattctttcagcaatacatgtagagtcaagtttcttgcatggataactgaacatgtgggttatgagattttaaaaaatgtctcgtgacaaactttacggaaatgcaacaatctggacatctagttttgtctgagagtggcgtggatatgaagaactgtgctgttggtgctgatgccacactaagttttggcagtcacactcttggttcttcatatttgaggagatgggatggtgaggaggcctgttggctttattttattacgtgccaccatctagaatacagattcttggatatttcatcttcacaaaggtgaagctgcaaactcag

SEQ ID NO: 184 - DNA, 700 bp, Homo sapien
  misc_feature (1)...(700): n = A,T,C or G
ccaggscawtgaggaaaagrgaaagaatwtarrggstwttcaaataggaaaaraggaagtccaaattggtcccntgttkgccagataaccatgattgkgkatttagaaamccccatgwtytcagcccaaaatctccttaagctgattaagcamcttcagtaaaktctcaggataaaaaatcaatgtgcaaaawtcacaagcrttcctatmcgamcaatamcagmcaaacagagccaawtcatgagtgractcttattcacaattgctagtaagagaagaaaatmcctaggaatacaacttmcaagggatgtgaaggwtctcttcaaagaagaactacaarccrctgctcaaggaaataagagaggmcmcaagtaaatgggaaaagcattctatgctcatggataggaagaatcaatcccgtgaaaatggkgatactgcccaaaataatttatagattcaatgctatccccatcaagctaccattgactttcttcmcggaattnggaaaaatctactttacacttyatagggraccaaaaaagaagcccwtgtagccaagacaatcctaggcaaaaaagaccaamcctggaggcatcacagtmcytgacttcmaactatwctaccaaggnytmcrgkgmccaaaacagcacggkacntggtmccaaaccrgacwtwtwgaccmmcagacacagaacmgagg

SEQ ID NO: 185 - DNA, 192 bp, Homo sapien
ccagyctttcttttaagtaagcgctttttcaagctcattgtagctacaaagtcaataaattggtctttgttatttttacctgaaaaggctgttaaaggttaaaatgacaaactcaaattcaaagggattggaggatttggtgtttatgatttctcagaacaacaatctagagaccaccagggtgggtttcag

SEQ ID NO: 186 - DNA, 688 bp, Homo sapien
gtgctggaattcgcccttagcgtggtcgcggccgaggtgggatatttcttctggatagatttcagataggtagttccctcaaataagattatatgggtttgcattttcaaggcagagttgtatacttcctgctctttatttaaataaaaaaacttgaaaatctgttctgcccagtattgtaagcgctcaggtacaaatatgaatgaaacaatctctgcctaagtaacacaagtatagggacaagattctcagtaaaattctcacgtgaaatttgtaactcactagacactatcaggagatcaataattatgtaattaaaaaaaataattacctgccaaactgggttcttctttggcacttctgcttggttttaagacaattctcacatagaagcttattattccccattagtcattccatagatgtaaaactggtagaaacaggacttgaattgaacattctttacaagtaagttatatagcttctgaaaaaagggcttgaaaaagcatttttggggactataagaaccttcaaatgctttcccctcttaacaaaccttaaaattattttgaaaataatttaagggggctgattttctcttgtcaaaatcttgaaccccacttaccaggtggttggtcaaaccaaagttcaaaaaaaagcttctggcctttcctttatcccacttgca

SEQ ID NO: 187 - DNA, 779 bp, Homo sapien
gcaaaaaacagatacattttcagtgtttaaaaatgaacaagtatggaaaggcttatacagtaactgaaaagtctcctttgggaagccaaggtgggaggattgcttgaggtcaggagttcaagaccagcccaagcaacatggcgagaccccatctctacaaaaaattaaaaaatcagccaggcatggcggacatacttgtagtagtaactacatgggaggctgaggcgggaggatcacttgagtccgagagtttgaggctgcagtgagccgcaacgcgccctgtactccagcctgggcaacagagcaagatgctgctctaaaagaaattttcttttaaagaaaaaagtctccctcatagcctgttctacaaaagtcctatttcttcccacaaaaagcctctggtacctggtgttagttcttggggtggaagattacttttaaaaatagaactattttttaagtatatcttttagggaactttagttcccgaagctttaggaaatgggatcttgaaaacaaaagggatttcaatacctatgacaatgcttaaagaattattggggcatttatttttcaatggagggtccacaaatctttggaaacccttggccaattaccagaagccactttaatttttgaccgaaaatgtttttaaaaattggcttttggaaaaactgtctctttccccaaaaatgaaaaccttgaaaaaaaggggaatttttaaggttgccccctcattaaattttaacccctctgaaagaaaaccctcttgtgacagg

SEQ ID NO: 188 - DNA, 394 bp, Homo sapien
  misc_feature (1)...(394): n = A,T,C or G
ggcgamgtctggycaccatcatgccctttaatcaactcacacctgtttaaagagtgtttctgatttgaccttcatcccttagtttactggcgttaaaaaaagtctcagcaattttcattatttctcgtgggtctcattatcaaacctttacttatttcggcatatttcctctgggcttcttctagtttctgccttacaagcaatgctgttctgtaaatttattgaaacctctggaacatttcacctttagagatggaggatggaaggattggyaccagaagagggctaagatacgttytctgtcttngagctgaaagcacagyctactctccttcgttttgycgatgagaaaagttgaggccagaagggaggtgacatgtttagagtcacccag

SEQ ID NO: 189 - DNA, 681 bp, Homo sapien
aagttctgactttggtctataaaacagggttattggctgtggctgcactcaatatctaaaaagttattaggaagtgcctcgttattgtcattaaagatatctaaatatggtagaccaaaggttgttgagaaacacatattatggactgagttctgtttcttctgctgtggcgcacctaagctcaagccttccttctctccctccccttctggccggcatggtatctgagctcacagacagacaaggcatgttagaatcatcagatcatgagcaccgtgctgggatttagccctctccaaagtcaattcttacagtccatactttgcttaaatcctcagttgttgaggtctgctctgctgtcagtaatcccagctataaatttcccccaaatgtggggcctagataaagtagaaggtggatggactcagcttattttcatgggatgacaggaactggaaagagaaagggcattgaaaataaaaagttattccagaatagcattaaccctcttactgttcaagaattaagaaagcctacttagaaatgagggccttgagaatgatacccaaatattggtctttctaccaaaaaatggcctttccaaatatctgctttcctgttccccaattggctttttaagtagaattaagttacctaaaactttacctgaagggtggtttt

SEQ ID NO: 190 - DNA, 839 bp, Homo sapien
caaatacatgatttccattggcatagactcttctatagtctctcaggcacaccttatgactaataagaacactgtcttctagatataagccaagttttaggagttatctttgtagtttctgtgttgagactatgggtcttccctgtgcaaagacttgattagcaaatactatttgaaacgatcccaaattcatagtgcagttgaccacccttctgatcaaggggatctctgtatatcccatgaaagcttcataggtctcaccctagattaagtgcttcacttctcaagacagtgaacagatggaagacttttgtagttatcattatacaactgtgccctgtgtgttttattatacaaccagagaactgaggcactggctttacctgtcagctacgccaggggtgtgacgtcatctttctgacttgatcacacatgccacattgcttaatatttcaagcttagactgaaataatcctgtggtaaaaaatttttggggggctggggaggtaaagaacaagggggggaactttggaatatttttattcattaatcatatttcccgaattgtattttattttgaaatgaccataagggacttaaatacgtattgtggttaaattaaatggacccaaatggaggtaagtaaacctaatgggacaaatgaataaaaggtttatgactgggagcatttacccatgaacctccttagaagctatttaacctttcttttggaaagccctgaaggctgggaacttaaattttaaagacagtacctatttccagaatcgcttccaaatggccatgttttaaagggccaacattttgggatggccctgccc

SEQ ID NO: 191 - DNA, 697 bp, Homo sapien
ccatcctgaatactgattttctaatggaactctattcaatggcgattgtaaaaccctgaggctccgttactattatggagcatactttcatctcattctcggctattgggcaatatgtatctcataagattttatcacatttcacagatgaactgttaattgattccatgggtacgattaggcgagatccaagctggagctgcagctctgagtcccataaattctttgtgcttctgtaaagaataaatctgtttttaatgcaaattaaaactactggcagggaattttggctcccagttattaaaagactggaaatgtgtaagtggagaaaggcaataactgcagtaatctcttaccggactctattataattccaaacatacataatggtgagaaaaaccgggaagggaagaatgtggcaatgtccactctttgccccaaacataacccttaatttccatggcgggcccaaacactggtaaaaaccaaaatggtaccctctatagcatgcaacttttatttcactccaaacgaaaaattattttgactatggcttgggaaatccattagtagaagaagttttataacctataggaacccggccatttcatttctaccaaatcacaggaattttagaatgggcaaggaatttacaggaagacttgcccaattatctttttttgggggactaaaccaa

SEQ ID NO: 192 - DNA, 687 bp, Homo sapien
ctggttactatagctttgtagtataatttaaagtcaggtaatgtgattcttccagttttgttatttctgcttaggatagctttggctattctggatcgtttgtggttccatataaattttaggatagttttttgctatttctgtgaagagtgtcattggtactttgatagggattgcattgaatctgaagattgctttgggtagtatgaacattttaacaatattgattcttccgattaatgaacatggaatgtttttcctttatttggcgctctctttaatttccttcatcagtggtttataggtttcattatagagatctttccttcttttgggtaattcctacgtatttaatttatgtatcgctattgctaaatggaatgactttttaaatttctttttcacattgctcctggtggcatattaaaagctactgatggatggtgattttggattctgccactttactggaattggtggatcagttctaatcgttttcttatgcacccctttacggtttctacatgtaagaatatatcaccttcaaacacggataatttgacttcttccccatccaattgggaggccctttatatcttctcttggcctgaaggctctacttaaaacttcttatccctttgttggaataacagtggggacaaatggacatcccttgtcatggtccca

SEQ ID NO: 193 - DNA, 493 bp, Homo sapien
ctgctaaaatgatgttgctaaagcattcctttttcttttgattaaacttcatgtttacaaaaaaattaattctagcagaataacgaatggttttgttttctagttctctgctgaatgaacagttttgccaattatcttcatagagtagtgatataatgaatgcaacctcaaatgcaaaccaaccaattcacagtccataccccaatcacttccttcatcagcctcaaaaatcgctaagtgaaccagtagaatggttttggagcagtaataggaaagcaaatagaaagtcaagggggactttcaacgccaacaagaccaattcagatcctgatctgactggtttctaatacaatctctttccagagtaatggagcatgagtctgccacacagaactttagagagagtcctttatttcaaagactgtaaagttggaagaattcattcatctgcaaagtcaaatgtcaaaagttgtgcttcccactcctcatcagg

SEQ ID NO: 194 - DNA, 424 bp, Homo sapien
  misc_feature (1)...(424): n = A,T,C or G
cyagggcanttnagcangasaaggaaatanmggggattcaattagggaacwraggakarwcaagttgtccstgtmtgcagatgmsgtgattgtatatctagamcaccccattgtctcagcccaaaatctccytaagttgataagcawcttcagcarmgtctcasgatscracmtcwatnsgcraaantcacmwgcattcttatacaccaatawcagacaaacagagagccaaatcatgagtgaactcccattcacaattgctacnmaagagaataaaatacctaggaatccaacatacaagggatgtgaaggacctcttcaaggagaactacmaaccactgctcaaggaaataaaagaggatmcaamcaaatggaagaacattccatgctcatgggtaggaagaatcaatatccgkgaaaatgg

SEQ ID NO: 195 - DNA, 229 bp, Homo sapien
  misc_feature (1)...(229): n = A,T,C or G
tgaacacccttnggaaggaacctgctcgnatgtannanaaanggaccggacagtctgctaaaatcgccctctttagacgcggcgcgccggggcagagtttttctctggtgctttgacctgtatttggtttaatggttttgtcctaatctcttcaatcaataaaattgtgcgtatttaactaaaaaaaaaaaaaaaaaaaaaaaaaaaaaaaaaaaaaaaaaaaaaaaaa

SEQ ID NO: 196 - DNA, 557 bp, Homo sapien
gcggtggctcatgcctgtaatcccaccactttgggaggctgaggtgggcagatcacttcaagttgagagtttgagaccagcctgggcaacataacaaagtgagatcttatctctacaaaaaaattaaacaaacaaaaaaacaaatcaacattcatttgcagggctctttggtcttcttaaagaacaaacatatgaaataaataagctgattcttaaagataacaaatataatgagctttctcaactgtaaaagcatctctaagttgttctatcaatgcatatccactccatgaactaacctgaagaaagtgttgaccattctacccaattaactgtaaactaagattgctttaatggtttgcctaaatttgagtacctttaaatttttgctttttatccaaattcattctcccttcttcaaattaaatagttttgttagaaatcggataagcaagatgtactttttagaaagggcaatagaatcctacaacatgctagaatttgaaatgtttttttaaatcagtmmtttctctatgctagtaactaagaaaattata

SEQ ID NO: 197 - DNA, 624 bp, Homo sapien
ttttactacctatatttaaaatgatccctgacgcccctcaagacaaatatattaatttttttactttgtgggatagagatcagaaaaagagtagagatgaaaatactggagaaacaatgcaggagatatttatgaggtgagaatgtcaagaaacttgtaaagggagaatactataatgacccctgaagagagagctttagaccagttgagtattagaggttgccacgtggctattcatccactaataaatacaagaaattactaaaatggaagccactggaaatatgttttgaggaaggtgagaatgtggacctattataaatgggtgaatatgatttctttctcattaagttcataaataactttcagacatgtaacagtttatgaagtgtgccgtagtcatttagtataagttttatacacaaaagtgtttttactaagactgtcacaggttcttttgtgaatcttgtttgtttttcctcattgtaaatactgcaatagaacatttgtgtcttaacataaggcaataaatgaccttaagaaccttcacttttatatagaaagtggaggaaaagttggcagagtaatttgttgattatagataaaagctcttgtagaaattgg

SEQ ID NO: 198 - DNA, 175 bp, Homo sapien
ttttttttttttttttttttctaacacttatgcatttattttcatgtgtaagaagaaaaacgtaactagcacgtgaacatgactgcatggatacacggctcagcacgaggctaaagtcagaagtgagtgaaagcaaaaccgcatgttgatttaagtgaaataacagaacagaaaa

SEQ ID NO: 199 - DNA, 871 bp, Homo sapien
ctgttgatcaatgatgagctcccaagagtaaccagcctctatatagtcagcatcactggtttctcaggaaaagcatcaccattgttcatcttgctgcaaaatgtatgcacaagtatctttttatttttaaaaaagccctgacattttatgactgctgcttttctaagatattttcaaatatacagtccatacggttcagacacaatggactggggatagagacggctatagtgccgataatggagaaactagccagagcttcagatatttgttttccaggacatctcaataattgggtacacctcacaatatgtgagacttgacgtcgagtggcacggcatactctggcgcaggcacttgataaagactgtgtttgcaaatacttagcctgcacttcaagataccaggcatctaagcacgtcccagatggtgacagttaatcttcaaaaaaccctatgtggaagtattatcattgtcctcattttacagatgaggaaaaagagacacagggatgtcaatatcttcctcaaggtcacacagcaagtaagtgatggaacagtggctcagccatgaagctattgctgttaaccactaggttgatttgccttcattaatttcttcctaaaactgcacatttcccgttagtccctctttttggtctgtcgtttgactcttggctactgcttagaggaagattcattctattattttctaacttagtaaatatgtgcaactccttggggacatgaccaggcaaaagctggatacagaaatgtatgcccaaacaccatcccaagttacccctaacaggtcttttctggaccctgtttgtaaggggggtatatttggaaaaatttttaaaattttctgg

SEQ ID NO: 200 - DNA, 737 bp, Homo sapien
gacattttgaaggtaacagcaatatctgtgtatagatggggttgtggttttgttatttatctgctattgctgaactatcctttgtcttgagcgataaaagagaagtaaaatactaaagaactgaactgtccatttctggaccatgagtaaagatgctggctgtcaaacttcctgttcatacattagtttatttatagagtgtactctctatgtaaggtattgactgataatgttactttgacttcagatagcttgcagtttaatggaggaagaagacaaacatgcaaataactaggtcaatgaggcatcctttgtgttccattggaagctaggctgctttgtaaccttgttaatttctgtggttttggagtgcattcattagcaaatacaccccttgttcttatccattctctgcttttttctttatttggcatttgatgacattttttcatgtggggaaattgagtcaggtgaggtggaaagaaaataaggacacgacactaaattctttgatgtttttccttaaaaaattgtttttcaagtgctccataaagggttgtgaagttttaagagccataggacttggattattgtgaaagagtgtctctagggggccaggttaaaccatttcaaggactctccttctctcatctcccttgttccacccagggtggcgacccccaaaaagcacaaagcctccctttcttcatgggaagggtaaggaacggaagggaacc

SEQ ID NO: 201 - DNA, 493 bp, Homo sapien
tctagaaatgcagcttttatttattaccccatttctttcaagtccttggaaaataacatattaagggtacaagaaattaacacatgatggaaaagtcattgtgacgccaatgaatttcattgagtataaactcatctacttcaaatttattttataacacaacctaagatactcaagataattatttaatggttagctcttaagttgaattggtctacataatgcgtgggaagaaaaccagatttttagccttcttgccaaatccagacctctggttgatttttctttgacagaagatgcaagttattttccaatttcacaattaaatgtatttaacatgaacattattttgctttaaaaactataaacattgtaggagaattatagccagtcttcagttataaccactccaccctcctcactttctctctctctctctcttttttttttgctatgggatttaatgggaaaaatatgtaaaaactgtcactaa

SEQ ID NO: 202 - DNA, 283 bp, Homo sapien
cctttttatctcagtgacaccgtccggggacgcaggtggtggtgactcaaggctagcctcaaagggcagccccacctcctcatcctggaccacagagaccacctgcttggcgcgccgtcgcttttccgagagggtggctgactccggggtgctggggctggggctgccgcccccgccgctgttgctgtactcctcgccccagtcgatgggggctgccctcggacagcaggtgcaggttgggggcactgttacgcaagaccatgctgcccggagaggtagatct

SEQ ID NO: 203 - DNA, 713 bp, Homo sapien
ctgcttttgcgcaaggtgccactggacgagcgcatcgtcttctcggggaacctcttccagcaccaggaggacagcaagaagtggagaaaccgcttcagcctcgtgccccacaactacgggctggtgctctacgaaaacaaagcggcctatgagcggcaggtcccaccacgagccgtcatcaacagtgcaggctacaaaatcctcacgtccgtggaccaatacctggagctcattggcaactccttaccagggaccacggcaaagtcgggcagtgcccccatcctcaagtgccccacacagttcccgctcatcctctggcatccttatgcgcgtcactactacttctgcatgatgacagaagccgagcaggacaagtggcaggctgtgctgcaggactgcatccggcactgcaacaatggaatccctgaggactccaaggtagagggccctgcgttcacagatgccatccgcatgtaccgacagtccaaggagctgtacggcacctgggagatgctgtgtgggaacgaggtgcagatcctgagcaacctggtgatggaggagctgggccctgagctgaaggcagagctcggcccgcggctgaaggggaaacccgcaggagcggcaccgcaggtggatccagatcttcggacgccgtgtaccacatggtgtacgagcaggccaaaggcgcgccttcgaaggagggggctgtccaa

SEQ ID NO: 204 - DNA, 275 bp, Homo sapien
gtagacaagtacagcagatccagacaccagatctagctaggctaaatgtacagtatctaacttgatctgaactgaacctgtattccttgatgatgcctaaaactacatccatagaattctggtgaacctgtaatacagttctgaaagtacagttttatataataagatgctgatctctttattctttcaagtaagagtgctagagaacaaattgtgttacttgccttgggatttattgaacgtctggaaaatgctgtcttcctagatccaaacag

SEQ ID NO: 205 - DNA, 694 bp, Homo sapien
ctgttcctgtacatttaactgaaaaaaaagtaacttaaaataatataaaaatagcactcatgtatgtcctacagttataggtgaaatttgatattgtttgtcttacatagcatacctatagacagcttaagtaaagtgactgttaagagggttatgcttattgatgaactcttgtagttgcttaccagctctgttagtatagttaaattgatctcagtagcttcaagtatttataaaatggttgaagtccaaatacatgtgataattacaatacactttgaattaatggagggtgggaggctagttgaaatgcattttatttacccaaggagtatgttaaaatgatagttataaatgttggaagtttaaagcaagatactcagtttagttctttacaaatcataagaagaacaaaattagatgttgacattgctattttaggctgtgtgttttccatatgcttcttgctttccctgtcacaggtggtggcagcaatattggtgtgattgaggttatgctggcaccactcgcacacaggcgcacaatggtgttagctgggcagaaagagtggcatctctggctaccgggctgggggcgacctttaccataggatgaagtaaccttgcattcggctgcaaggtgtactgtaccgtacacaggtgctgggtcgatggccactttctgcttttctttc

SEQ ID NO: 206 - DNA, 704 bp, Homo sapien
  misc_feature (1)...(704): n = A,T,C or G
tttttttttggnaaaaacagggtttcatcatgtttgccaggctagtctcaaactgctgacctcaggggatttgcccgcctcacccaattcaactttcgtaagtcagtatttaccatctaactcagtgtcccaaaatttaaaatttccttgcactttacagcaaaaatacatattggggctctactgaagcaatatatacatgtcaaaactaaaaatcagaaaagcaaaagggtccattcaacatatagcagcttatatttaaatatgtacaggtatgtatgttttcacagttagatctttaaaaaaatttatatttgatatgttcaaaaatacttctattggctataaataatattttaaaagctcaactgatcaaaatgcattccaagaacatatcaaattaaataaatcttctacgtctttaaaaacagataattgaagtcagtaaagcttgaggtttgtgttaagtgtattctgtcagtccctactactagggaaggcagaatcttctaaatacgatacgaaagaaactcccaaagcttggaaggaatcggcagctcctgaactttttggggggggcatccctcttcgggattgacatgcgacataaatgttgcaagctaagggaccccccccgggggagtgggccccaaaaaaaaccacaccttccccgtcaatggtggtccccccaccaaccttaaaaa

SEQ ID NO: 207 - DNA, 225 bp, Homo sapien
ccattttaactgtactgccaatagaattctggaattgtggaaaattgtatcattgaagttcagtaggatgtgtggcttaaaaatttatcaggaccacaaaaaagaaaacaaaaatatttggtactgaggttcattgccagggcaggaggtatttccagaaaatactcatgcctgtgttctgttccttgctttcccaaatactgcatgtgactttcctaagcggca

SEQ ID NO: 208 - DNA, 678 bp, Homo sapien
  misc_feature (1)...(678): n = A,T,C or G
cctatatctatcaaaaaaaatccagttcctaactaataatctcccaaaaagaaagcaccaggaccagatgatataaatggcaaattttttcaatcatttaaggacaaaataataccaattctgtatcatttcttccagaacacttcctaactcatcgtatgaggccagcatcactctaatagcaaaaccagataaagccattacaagagagagtgacagaccaatgtggttttattgaggatgcaaacaaaatttaacataatatttaatagtgaaaaactggatgctctttccctaagttagagattaaggaaagaatgtccccttcactactcccatacaacaccttactgaaaattctagctagctttataaaataaanaaaaaccanaaaataaaataaaaggtgtacagactggaagatacagtgaaggaggaagaaataaaattttctttgcgcataacatgattcttctatgtggaaatcacagagatttgaacattttttttttttgagacagtttttgctcttgttgcccaggttggagtgtaatggcgcgatctcggctcactgcaaccttcacctcccgaattcaaggtgattctcctgccctcagccttcccggagtaagcttggggattaacagggcatggcaccccccatgcccccagctaaat

SEQ ID NO: 209 - DNA, 720 bp, Homo sapien
  misc_feature (1)...(720): n = A,T,C or G
attattttgaaccctagcatttagaaatgaaaaactttttataacaatcaaatacatgataaagtatgcaaagagtaggaaattattctgatgacatatggagggttacaaaggagaaaactttttgctacctctgataaagaatagactaaattctccaagaccaatctgactggtgtcataataaaaggaggtacacacggaagcacaagggatgtgtgcctctggaggaaaggtcaggtgaggactcagtgagaagacaagccaaggagccaggtcttggaagaagtcaaccctgttgacaccttgatcttggactaaccctgtggacaccttgatcttggacttttagcttccagaactgcnagaaaataaatttttcttgtttaagccacccanagtgtantgttttgttatggcagccctaacaaattaaaattatattttaacagagaatataaaattctaatataacattttacagtaaagcattcatggtcttttttttcttattaataaatccatcaaaacagaaagttttgcaaaattttaacacatttctctaccactactgtttctactctcttaaaactactccgcaaatataaaaatagaaggccaaaatgcatcattaaaacgatgtttggggactaatggccttaaaattctattacacttggaaatatacaaatattcaaagattatctattgatcacctca

SEQ ID NO: 210 - DNA, 277 bp, Homo sapien
tccatgtatttttatacagaatggaacaatatgtatgtatgcaatykttacattccaccatgaaataaaacagtataatgaaaataacaatagattcaaacaatgatatgctatttttttttacctatgacattggcaaggtcttcttaaaaaatctgcgaataaccgatgttggagagatcatggggaaatagccactcaaatgttactcatgagagtgtacatatgtgtaacttcacttggagggcaatttggtgatacatttaaaaagttttgg

SEQ ID NO: 211 - DNA, 715 bp, Homo sapien
gtggtagaaatactaattttgcaattacagaaaaaaacaaatgccattcacatggttyctaacaaaaagtgtctgaccacccccaccccccacccctcaaaaagcccttaaataaagaggaagatcaaaagaaaacaaaataattcccgagtttcacctcatacatacaatatagcacaggaagtggcaaagtttaaaataatgcctttactgttaggactagtatgctgtcaaaagccacaatccttttgttttagtgagttgattttcaatagaaaaatacaaatgaacatgtgtttaagttccaacatggattgagcacctctgaatttagtatcaaatgattaattttatttttcagatgtcaaatcttagtataaaattttccattattttaaacttcacttgaatctttaaaaaagctgtctaaattgtactatatgagttcagtttaatcttctgtaaaatgctaacaaattgaactgtcagcagtcttttaaaaaaaaatgggggctgggttatttctagaagaactctcattaagctttgaaaatcagaaatcagagacaaataacttcagatatagactagctccacaagcaaatttatacaattatctgtaacagtctatacatatatgtgtatatatatataccgtaaccactttcataggtaaaaaatattaacttcatgtcacactatgatcagaagtata

SEQ ID NO: 212 - DNA, 717 bp, Homo sapien
agcctcccccaatgccttaaaaggtcacagtagatctcagctctgaacagaaactcaactgaaactcttcccacaacccagcagtagatatattaaaacctacaattttcagggatacaaccaatatttaattcttttgagggttttgtgtttaatacaaggacacaaacacacgtataaaatgacgatgtcaatactgattaaacagaacaacaaaataagaagctcaaattatcatcagctattgtgtatatctgaaataacaataatgcacttgattctgaaagaatgattagagttcctactctgaaaatctaattgtcttgatgtggcgaagtgagaagaaaggatgatttttctaatgaaaagcatgtatacgggtagccctttgcgagattctgtcaaaaccctgaattttgcattagctgttttaccacccaaacgtttttacccgaggatgtgcagcaatgggaactctcatacactgcttgtgggaatataaatcagtataaccactttggaaaaccatttaacattgtcaactacagctctacacacaagtgctataaccacccattccactccagggtatacaccctaaaaatatgaagtgcccatgtctacccaaaaggccgcctaaaaggaatgcttttgagaagggttaaccttgttaattagtggcaaaactgggaaaacaacccccaaatggtcccatcc

SEQ ID NO: 213 - DNA, 599 bp, Homo sapien
cctgttttggcgaggcaggagggaagcgggatgggagtggtggttaggccaagggtagttcaaagcgattcagcaggatgatgaccacaggagtgctggagccgggcctttcagcccccgtgtggatgatgaccggccatccaggacatgcgagggcttgggacagtggacagccagtgccacacaaggaaggaccgattaaatgacacagttaaaggaatttggcctagggagtgcaagccagaaaggtttggtctttttatatatgtaacattggaaaaaaggaacatctcctgttccctgtattaagttttgactttagctcagcaaatgcagtgtttgtggcagtaaatatactctgataacaatgttctttcccaggaatttagagttttatgatggttattgaaaatgtttacatgacaggctgtcaataatattttttgcctctaaaaataaaacatacataaagtgtacggattttaagtatgcaactcactgaacttttcataccgtaatacaccaccctagtaaccctcccccagttcaagatgtagactgtttccaataacccctcatcctgttccttaatagccccc

SEQ ID NO: 214 - DNA, 789 bp, Homo sapien
ccttatgacaaaccttgctatgccaaggatatgcttcactatcttcatctatcaaaacactatgcatcatagatatctaattttttcatctcttgcatgaagtctttcctgatttccctctgctgaaatttctctcttcaaatgatgtgtttccatagtactttgtcccttttcaaagatatatctcacatcgcatattttaccacagttagtttcatttcttaactctcacactagattacaaagtcaatatagacaaagaaatgttcaaccttatataacctcctctgcctatgctggtaaattgcacctactatgtgttcaataagagcttgtctttttcaatatacaaaactttgtaaagattaaagaccttgtagaaagtcaagaggaagatagcaatttcacttctaagaacttaccctaaggaaacattcatgaagagatacaaggggttatgtgcatggatgttcattatcatattattcttcattatgaagattatgatggtaataatgaaaatgattatcttgtattgggccttatttgaagtcaagcattgagaatgtactttatctgcattatctcactgagttctcgtagcagccctataaggtacagactgttatctaagcttaaaaaaataaagttaatgtccaaggtcaaacaactagtaaaagaagggggctaggaaatttggaaccccaaaaggggcaacctctcaagggctatgaatccttaccattattataaggaagcttggcccatggtggcccaaaaaaaaccggg

SEQ ID NO: 215 - DNA, 765 bp, Homo sapien
ggatgtctgagcaggagagagaccatgtgaaggatggactgaatggagacttgtatcaaagagtctgagtatcaaagacttgtattagagagggttgttgtagtaatctagtcagggtatgagaaatggtttgtattagagtgtcaggagtagtcgtggcaaaaatatatagatcaggatgagggatgggcctcatctcacaccctgactccagtcaatggcagtggctccctggagtacactactataggaaggattttgtaaagttttgtctggcctcagtggagggtgaggtaggggaggagttctatgaacagttagtggtgtctgccatggttgaaacaatggagaagggggacaccttttctgtgcagatgttgcttctggtagatataatccacaatgtaatgggagaagtactaagaatcagtaaattatggagggtgtaaaagactactgatatttaagcctgcggaccggacttagagaaatgatagttaaaggagaaatatccagcaaacaaagatatgacattgaagtttgggactgcgattagtaccagagatttggattggaggtgatttgtatagaatggataggtgattttactcttgcaatttggattgaggggtggggaaaaccagaaaggggctggggggtaaattagtagaaggtcaccttgaattcattgtggtccatatcaatgctgaaactgattggggaactttttactcttgagtccctttgtaagggaaccccagaaag

SEQ ID NO: 216 - DNA, 780 bp, Homo sapien
cctttttctgtggcaaatggaggcttttcactgcctgtagagacaatacagtaagcatagttaaggggtgggtcagaacatgttaagataacttactgtatatgtattcccttgtattttgttaaagctggaacatttgatatttttccatttatttatgaaaaaatatgaacctattttcatttgtacaaggtaattgttttttaaagcaagtcaccttagggtggctttaattgtataagtcaagcacatgtaataaattcaaaacctgcagttaacaggatattagacatcaatcctggtaaccaaatattaaagattctctttaaaaaagactgaacatgtttacaggtttgaattaggctaaaaggtcttgcagtggcttttcatggcccttcaaattggaatggaactactgtactttgccatttttctataaatcagtactttttttttaattttgatatacattgtgtgaaaaaagaaaatggctaataaactgtattaaatcttaaacaatgtataaagattgcacttagccagttcaaagtgtatacttattcataatgaattataacagttatatttctgtgttttcttgtaaatgtttcttttcccttaaatacagataattcatttgtattgcttattttattatgagctacaacaaaaggacttcaggaacaagtaatgtattagtatggttcaagattgttgataggaactgtctcaaaaggatggtggttattttaaatataaatagctaatgggggtggtaaa

SEQ ID NO: 217 - DNA, 810 bp, Homo sapien
cttttaggcagcccggcaccttcatccataggcagagagagaactgggtgttggagacttattcgagggtataggaagggccctgtgaagttgatttaacttttggatgtcagactgtgaaagctcctgagaaacttggggtaataggatcttcttttggggatgaaaatggggaaggcgtgaggacctagactacttctccctaggtcagaaaaagagaattaccccttgacaaatatgatacctgctaggtatttcccagggaaatttagggattggcgtctttccctagcatgtggaggaattggcagacagcttcctaagggcggggagcgggggcccaaggctgacactgcttgcatccacgtgaccttaagttatggcagatgactctgaaacggactgaggccaatgagaacagatggatggagcactcaggttagacttgttccttctcctatgctggaggagagggatggttctctagaatgttggaggtgagttgagagctcgcctcttgaatgttgaacagtgtactcttctgaaaactgcatattcactttatgtggtttcagaatactgggctcaatactaacataagaaagacacttcattgagaaattcttaagcttacagaaaacctatctctttgcacattccacataacccctagcaaaatgcaggttcttcatacttctgtcctttttccattggaagaattgcttaaggaaaaattaattcctatttattcccacaaaaggttgggcattgctttgattttaccccatgggggaatgtgcctttgaattt

SEQ ID NO: 218 - DNA, 817 bp, Homo sapien
ctgctcccttatggaggtctcttcattaataattattggatagatagagaaggtgagcctgtggcttccaagtaccggcttttgctgaaggtctacatgggaagaagagcatcatttgatattcagtagatctgccacacccaactggctccatctcctggaaaacagcactcactacaagcaactgtaatagcacccagcaatgaccacgctgctcctgctggctcttccgtacaccagtaaatgaactcaccaatgtattgcacacatacatttcacagtagtacaataaagccctgtatcaggagtggtaattcaatgacttgactctatagtgcactgcagctttatgtcataccaacattcaaatattcaaatatccttccaatccatttggacaaaaatacaccatggctgccaagacacatgtatttttctttcttccatggactcctaaactgctcccacaatcagcagtgttcttctctcagaaattatcttaagcttctctactcaatgggaggtacacacagagacctgagaatatgcagaggccagaatctctgtctgtgctagagatcaactgtactctgcccacctggggaacacatcctctgggtaaagtactcggaagtaaattacattccctggagacagatacgggctttcactgcagcctgttagaaaacacaatgtctgtaagttacctcataggtcaaagagttttggattatatttttcataatggggctatggcctttttaccctggttttaatacagaaccacctgcagaaaggacattgaaattaaaagcca

SEQ ID NO: 219 - DNA, 661 bp, Homo sapien
ggatgctgaggcaggaggattgagtcctggagtttcaggatacagtgagctatgatcatgccattgcactccagcctgggcaacagagcaagattctgtctctaagaaaaggaaaaagaaaatgaatagatagtggtattagatgttaatgacatcagttgtttttattctttattctttcttagaaacagattagttttctcgaattaaagaactaccatttttcttttttctacaactttcaagagctggtgaagaaatgatgtttagatttaatagatatagtagcagtcatatattaatagaatagaaactgagactctaggaaaaagatagacatgagataaggagtaggcatggtagacatttctagattatttatgaaaatgttgtagaattcatttttttttttggtctgacctttggcaatggtgctgaggaagggaaagccagcccatcaggcaaggctctgttttctgcattttatcccgtttgattcttctcgttaggattggagcaaataatttcaatatgttcttcgctgggtttatcatagtgacccttcatttaaagggacttttaacaattgacttaaagaacactgagatgtgatattttattgggatttgaaagttgccattgggttttaccttccttaatt

SEQ ID NO: 220 - DNA, 792 bp, Homo sapien
  misc_feature (1)...(792): n = A,T,C or G
cctctttttattcctacaaataattttcaagtacacacaattgggtaaacaaagaaacaaagccaccaagaatgaaaatcagtaggaataacgaacaagactcacagatgtcaaacaagtctgtgggtcttgcagacttcagatgttggaattattagtcgtggcaagngnncaaaacattagctattaccattatgtttaccaactagtgaagtgaactatgagaggatatattaaccacagaagttaatagaagaatagactcctgaaaatatctggatgctacaaactaaaatatagtatataatccttcatagagtgtcagtgacttcatatttataattacatttttgtatattagcagtgttctagttcttactgccttatctttaagctgannnnaaataaaattatattttgggattcaaaaacacatagctaatgattactatgtggcagtgttacattactttatcacatatcattaacataatctgcatgtgttcaaagagatcttcatacttctttgtagctcccacttctttgtcgtctttgtagctcccacaacatctagaacagcacaaccgtatatggagaaaactcagtctagtattcgttgaatgactaatggaaaatttagttnataaacagaactttcttcattgnacaaattatcttgcagaagaataatggccttagtttaaaattatcatatttacccatntcnccangttattttatctcttttggctaanaattttgaaaacggtaccttttaccctttggcatttt

SEQ ID NO: 221 - DNA, 759 bp, Homo sapien
  misc_feature (1)...(759): n = A,T,C or G
cttttctgctgctccgggaggtggagtggcctggcagagggcacatggctgccacctgctgcaaggaaaattctcagtgaagactcctcagtatgaaggagataagcctgcacaatcagtcactgatagatgcttagtggaaaaacttccaattcccatttacagctctcagagctaggattaaaaactcctggtcataaactcatgtgatgagaagttatagcacgccctcattttctacatanccacttgcatttatggttggcttttgaacttgctagaagggaaagaagtgcaaatgtgtcctccttagagctactctcctccccttggtgggtttccagtttgtgcattgtccagatggcccaggagctgacgatcaaagggaagaagtcatgtttgtcatgagaatgctttgctgcatcaggattcagtgaagctgttcaccgcctggagcccatgcagcctcaagaggcaggatggagctcagaaaccatcactgaggttagaaagtgagcaccaaagttgagggaagcccacaggagtgagccgaagtgctccctttggatttccaaagtgggtgctgctgcttcttccatcagccttgcttctgaccccaatgcgttcctggtgccttcttcttggcattttgctgtcgggggcccaaggaaaaaaattcctgcatggcagtggtgaaaaaagatggctgcctgctgaaacctgatttggcctgggtaagccttttggagccccggttaa

SEQ ID NO: 222 - DNA, 699 bp, Homo sapien
  misc_feature (1)...(699): n = A,T,C or G
ccttntnaagagttggcattaattcttcactaaatgtaggagtagaatttatcaggtaagccacactgacctctggncttnttnncgcccgatgatttttaattagttgaatccctttacttgttatatatgtattcatatattctgttccttcttggatttacttttatgattggtgcctattgaggtatttatttctagtttgtggtacttcatgtgtttaggttttctagacagtggacatagaagattcaagaagctaaatgtaggagaatgtntaatgtagganantgaggcnacnatatcatcaatgaatgacttgaagtttcctctgttgtaaagaatgatattaccataactgccatagntaatattgatggtgtaagtcaaataanaaggcaggaggaaagggacatccatcactgaaccacanatcagagnctcattgaagcctttgagaagaatccacaaaattttacaggataattcatttcctgcgatcaccacnagaagagaaactggttaaacagacaggtattccagagtccaaaaatttacatttggtttcngaaccaaagacctcagctcccaggccacagcaaaagggggcttatgaattccctggcacccagncccaagacccaanaacctcatcttgattggtttngggcttgggaaaccaaaaaaccaatgggtggc

SEQ ID NO: 223 - DNA, 598 bp, Homo sapien
aaaaagagaaagtttcagatttgccattcaaggcttatttatatatatgtgtgtgtatataaatacatgcacacacttgcatacatatatatttttggctgggggagtgtgagttttgcctttctaagggagggaccgcgcaggctcctttgttctgtattctggcggagatgggtcctggccttgtgtcactggcttatccttaaagatcatctcccatcctccccagcgccatctgtgtgcagcaaccagaaagggatgaacttggccctcttgcgggcctggacaaggtctcttccttaccctttctgttgccagtcagcaacctgtaactcacattctcttcccagtgaatccctgggagcgcctgaccctggtgggctgttcagcttcctgctgctggggccagcaatttttgaggatttatctttaggccaggcttgcctccgtacttatccctgctctcccatttctctcttgtttgagagagaatgaggaagcaaagagtgagaaagaataggggctgaagacgccactcccagatggctctttctatcctgctcttctgttgaaacacacgtgctgtgggcctcaggcg

SEQ ID NO: 224 - DNA, 501 bp, Homo sapien
  misc_feature (1)...(501): n = A,T,C or G
aaacctttatgatgacttccttatgaattactgaacgaacactggaatgggactcaggtatcctgaggacatctctcaactctggccttagttccccctctgtaaaattagggtgccaactaaatgatctacaaggtcccttccagcgccgccattctgtaattacatcatgtgtaactgtattaaacatacacaagtgactgccaggcatgggaatgtaacttccgagtaaatgctttggtttgttcagaatacactatgaacttctttccaaagacgggttgtggtaaatagtggatattttgattataagaaatagagtttccttgaagctttagctggagatacagcaatagtgtggtgttcctacaaatatcacagtgtattcaaacatatttttctatcaaaaatcatttttgtaaaagctgtgtgtttttatccaacttgtgataataaatgttctttattttagaacaaanaaaaaaaaaaaaaaaaaaaaaa

SEQ ID NO: 225 - DNA, 295 bp, Homo sapien
cctgtatagggctcgtttccccacacatgcctatttctgaagaggcttctgtcttatttgaaggccagcccacacccagctactttaacaccaggtttatggaaaatgtcaggaaaaaaaaaaaaaaaaacacatgcactcacacaatacccaaacatcaraattagaagggcataaaacagggggctttataggctgaaaaatatcttaratttcaraacagaataccaatcaaatattgaaaattcctttgttcaaaacacaaagatgttttgtttttaatgggagttttttt

SEQ ID NO: 226 - DNA, 372 bp, Homo sapien
agattcctggcttagagcatgcgagcattgaaggaccaatagcaaacttatcagtacttggaacagaagaacttcggcaacgagaacactatctcaagcagaagagagataagttgatgtccatgagaaaggatatgaggactaaacagatacaaaatatggagcagaaaggaaaacccactggggaggtagaggaaatgacagagaaaccagaaatgacagcagaggagaagcaaacattactaaagaggagattgcttgcagagaaactcaaagaagaagttattaataagtaataattaagaacaatttaacaaaatggaagttcaaattgtcttaaaaataaattatttagtccgtatgaaatgaaat

SEQ ID NO: 227 - DNA, 599 bp, Homo sapien
ggcccccgtcgcgggagccgcttcgggccttctgggcatgtctgccatatggctccaggtttgtttttctccccggcactctgacggggagggctcccggcatctcctggcatccgggtagaggacgcggaggatgctgagctgctggcgcactgcagcacaactagagatgtacggatgcccccatcttgatcttacagaatcagaggtacagccgcgagaaagagtcaagaacagacagagtcgcttgaggactcaggagggtgtttgctgcgttgacaacagactacaccctcacagtttgctctgctcttccaacaccagtggaagatgatcacatcccagggatcagtgtcgtttagggatgtgactgtgggcttcactcaagaggagtggcagcatctggaccctgctcagaggaccctgtacagggatgtgatgctggagaactacagccaccttgtctcagtagggtattgcattcctaaaccagaagtgattctcaagttggagaaaggcgaggagccatggatattagaggaaaaatttccaagccagagtcatctggaattaattaataccagtagaaactattcaat

SEQ ID NO: 228 - DNA, 343 bp, Homo sapien
aaagtaaattgtatgaaaaattcatttcttcaattgcattagccacattttgagtattcatgtggctggtagattctgtattagcacaaagatatggaacatttccatcaccacagaaagttctgttggacagcactgcattagaatattttcatactgctcttcctcaattaatttttgttgttaatgttgatgtcttcattggatgggtcataatgttccatgaaaccgctcaagtacacaattgtatgttctttgtatcccttaccacaaatatctcgctctgctcatttcttttgcagcttcctataaagtttgtcttcctcaaaaaaaaaaaaaaaaa

SEQ ID NO: 229 - DNA, 417 bp, Homo sapien
ctcaagctgcagtccaccgggtatggttctggatggttcccccaagggagcaggtatgtaggaggtgaagaaaactgagatttcaagtatgggagagtttttactatctccattcctggattaaaagtgctgaaaaagtccacagttaaacattcctttattcaccctatggctcccaagaaaagcattcttcctctggagtactggtgtactaaggggacaatacaccaaatttgttgagtttacaatcaagtctactaaggttggacttccttatcagtttggcagagtcccagggcagaataatcatccatctacaggtctctgtttcctctccctccgcagcagtggagagcatcccagtgtttggggcactgtgttcctcttcgtccctgcaccagaccctggaagccttgg

SEQ ID NO: 230 - DNA, 462 bp, Homo sapien
gaaataccagaagagaaagtttcattgtgcaaatctaacttcatggcctcgctggctgtattccttatatgatgctgagaccttaatggacagaatcaagaaacagctacgtgaatgggacgaaaatctaaaagatgattctcttccttcaaatccaatagatttttcttacagagtagctgcttgtcttcctattgatgatgtattgagaattcagctccttaaaattggcagtgctatccagcgacttcgctgtgaattagacattatgaataaatgtacttccctttgctgtaaacaatgtcaagaaacagaaataacaaccaaaaatgaaatattcagtttatccttatgtgggccgatggcagcttatgtgaatcctcatggatatgtgcatgagacacttactgtgtataaggcttgcaacttgaatctgataggccggccttctacagaacacag

SEQ ID NO: 231 - DNA, 328 bp, Homo sapien
ctgtgggttttcctaaacgcccctcatctggttgaagccctagtgtttctttctcacatcagaggcaaatgcattggggtgggtctggtttggacaataaatttcctctggtttggaccaagaaaaacagagttctttgaccgctaacatatatgtaaaaagaaagtttgtaaaaacaagagttaaaatgcttctaacagtgtggtcatcactgcacaggacactggaattggcattcggggttgtgtctgtccatgtggtttcgttgtatgtcatgtgctctcagctcagacagagacatccaattgacttctgacttggggcattt

SEQ ID NO: 232 - DNA, 595 bp, Homo sapien
cgccaattttagcaaataagagattgtaaaagaagcagattgaatgaagaatttttagctgtgcagataggtgatgttgggatggaaaatgctaatcaactaccctttcttttatcaagtaattaaaataaatctacataaagaaccaaaaaggctgttttataaaagtgaaatatccagtatttcagagggccaggcaagagcacttcagatgaggcagtcaaaatcatttttttccagtgaggatagaccacaagtgggtggtgagaccattgaaagcctttatcaactgaagagtccatttaacagcataatttgtgggaagactggaatagggctgaataaatgtgtttgaatctctaattttatactttcttttcctgaggaacttgatttttctgtccctggatcgccttgtcataattgggtctgttccttttactaccactcttgagtccatatatgaaatcattaaagttggatgatcagttttttataaaaatatatatttttgtccaagaaaaaaaaaagcatacatatgtgattatggctaaatcaaaggtaactggaatgtatatacttttgctaatgttcc

SEQ ID NO: 233 - DNA, 600 bp, Homo sapien
atgaaggtaaactctaaaatcttcataggtcaacaaagaaaatttatccttcacacttatttctagaaagcagcagggcttatttcctagattgcttacaatgaagctagaatatctgcgataactgtagagtttcaaaaaggatccctagggctacttctacgttctccttaccagttgagcactctccataatttccagacgggtcatgggggagaatgatagaaatgagcgtgggaagaaagacaatgaaattagaaatgggtgagacacatggtggtagaatgctaagagcagggatcaggacaatcaaccaggtgtctaggaagggtcaagtcaccagtgtcatctgctgaccaatgttaggaagaaataaactcaaaggaaacaccacatttttccaattaaactcaaatctattgacttgtggtggttctttgatgttgtggggactgctataacagaaaccaattggattttcaagggcaagaaactttgccactgaataagatgatgtcatccttcctgataacaaataggaatgggtggtcagctctaaacagcgtggactgagggagttgcttttctacaatattactt

SEQ ID NO: 234 - DNA, 500 bp, Homo sapien
aaattcctaattcttttactatcttctcaacttttcccaaagataaaataaatttcacataatttcatggaggggaaatggtagttgtaaaaaactacctcaagtagcaatcaccgctggcagtgttttctcactttctgttctgcaattgcaatcacacttccaaaaagaaaagcaaatgtttgctaaaccatagacagacaacctctttgtgactggtattataaggtttataatgaaaacttatcaaatataaaaggtgctccctcttgaaaatgtgtattttatttgaagttttgagtaagaggtgagtgtttggcaattttcaacactcccctcaaaaatctcccaaagttgcaaaaaagtcagtttagtaaaattccaagcacttaaatgcttcattgagggccagttgatatacgcaatgcactaatgtgtaaaaattaaccgaatgcaactattttataatggagagctcttaccttttccttccagttttt

SEQ ID NO: 235 - DNA, 159 bp, Homo sapien
aaaatttacagataaaggcagttcaatactgccactgagaagtacatctcttaacatatacaactttcaggccacagttttgaaggtctgaagtattaagttggtttgatgaattagtcggttggcacttacgaacacatttattgccttgccatcttt

SEQ ID NO: 236 - DNA, 254 bp, Homo sapien
aaataagtgaataagcgatatttattatctgcaaggtttttttgtgtgtgtttttgtttttattttcaatatgcaagttaggcttaatttttttatctaatgatcatcatgaaatgaataagagggcttaagaatttgkccatttgcattcggaaaagaatgaccagcaaaaggtttactaatacctctccctttggggatttaatgtctggtgctgccgcctgagtytcaagaattaaagctgcaagaggact

SEQ ID NO: 237 - DNA, 591 bp, Homo sapien
  misc_feature (1)...(591): n = A,T,C or G
tttttttttttttttttttttttttttctaatttttactttttctcaagtttaatgtaracatacaaraaaacatcaagcaatgtttattgkgcaattccaatcattatttgcaraatcttggtttaaagtcagtytttatagccatttcaactgcttggtttaaacaaaaagcaacaatctggttatytacctataaatttcatggtatttytttaaacactgaagtactaaaagcactgatgatttgtattataatttttaaaatatttaaaacctacacagatttcataratcattccttttataaaataatcaaaataatttgattatytggaaaaaaaaattcttgaaacaragccctttccaggtatyttcaatctctgtaaaaccccaaaccccaaacagagtaratgatgaaataaggatttctcagttgcccaagactgtctgaaatttaaggttgaaaaatggactggcgtttttcatgtttcctgngaattcanagcttacaggtggcatcaaaactcaaatctctgggatggctttacatggctttcactttgatttgtttcattttcatttgcttctt

SEQ ID NO: 238 - DNA, 252 bp, Homo sapien
aaatggcttttgccacatacatagatcttcatgatgtgtgagtgtaattccatgtggatatcagttaccaaacattacaaaaaattttatggcccaaaatgaccaacgaaattgttacaatagaatttatccaattttgatctttttatattcttctaccacacctggaaacagaccaatagacattttggggttttataataggaatttgtataaagcattactctttttcaataaattgttttttaattt

SEQ ID NO: 239 - DNA, 153 bp, Homo sapien
ccacaataaagtttacttgtaaaattttagaggccattactccaattatgttgcacgtacactcattgtacaggcgtggagactcattgtatgtataagaatattctgacagtgagtgacccggagtctctggtgtaccctcttaccagtcag

SEQ ID NO: 240 - DNA, 382 bp, Homo sapien
aaaaaaaccatctaaaagtggttttttaatatatatattttttccaaaggaagaaatttcttgcttttactcagggaaaaaaaaaaattaaggtacatttgagtagaatgatttcatctaaaagagttctttcaggagacatctgtgattcactgcattgtttttattttcttctttttcctcttcttttccaacatttctaccattttcctcttcttggttgatatcaggccactttcttttgttgctttcttactgtcacctgttaaaccgcgtttctttgtgttaggttttgaccgcttttcttctttgtgcactgtgtcaccaggctcctttttgccaattttggactgttctttacttacaggagaaggctctgcag

SEQ ID NO: 241 - DNA, 400 bp, Homo sapien
ggcatgagccaccgcgcccggccctatcttttacttttataaatagagatgaagtttcaccatgttgcccaggctggtatcgagctcctgggctcaagcgatcccccaaccttggccttccaaagtgctgggattacaagcgcgagccaccgaaattattcttaactagcaagactaggctctgacatcacatccttatagttacatccctttaagcagggttcagccactcactctgcacctggagaacttgatggttatccctcgaagtgacagtcctgcaaatgacaaaaacactccaaatctattaggttggtgcaaaagtaattacgctttttgccactgaaagtaagtcccacaggaccctgagggaaatgggagggtggggtatacatagcag

SEQ ID NO: 242 - DNA, 75 bp, Homo sapien
actcacatatgcagacctgacactcaagagtggctagctacacagagtccatctaatttttgcaacttcctgtgg

SEQ ID NO: 243 - DNA, 192 bp, Homo sapien
gctccacatttgtagcgaacactttgactccaaagagaaggaggaagacaaagacaagaaggaaaagaaagacaaggacaagaaggaagcccctgctgacatgggagcacatcagggagtggctgttctggggattgcccttattgctatgggggaggagattggtgcagagatggcattacgaacctttgg

SEQ ID NO: 244 - DNA, 616 bp, Homo sapien
aattttatagcaatatactgaccattctaaaaataacaaaatacatgttgctctcaactacatagttaaaaaaggtagtaaattctcttacccaaaatagaggaggggtgggctagtgagctgctcaaacatttgtaacaaataaaaatgtatctatatacatataatgatcatgttttcatagcctaaaatcaccatacaaaatctaataataaaattgtgtcgtgttcaggagttgggaagccaacacattaaattaacaaagtatttttggtatatgtaaataatgggatagaatctctcgaatcaggattgtcccagaagttctaaggcagatgtcaatgacatgcacattgtccatgttcagtaattttcaaagactagaataaactatgtaaactattcaatacaattcaatattacttaactgctaaaaagtacttcaagatcttgcactgccttgagtgagtataatcaaattagtaattggaaaatagctgtaatagcaggcactgaagaattctgacaaataccaaataactgtttgtttttaccaaataaactggtaagatgatatcacaaagggttttaagttattttgctatacaaggttttt

SEQ ID NO: 245 - DNA, 165 bp, Homo sapien
ttggaacagtggattaaaatccagaaggggaggggtcatgaagaagaaaccaggggagtaatttcttaccaaacattaccaagaaatatgccaagtcacagagcccagattatggcccgctaccctgaaggttatagaacactcccaagaaacagcaagacaagg

SEQ ID NO: 246 - DNA, 229 bp, Homo sapien
tgtactggatccctccaggtgggggcgactctcacctgactattacaatagcctcctaagtggtttccctacttgcaaccttgcccgtataatatctatcctccacacagcaggcagggcgatcctttaagaatagaagttagatcatgaaaatgctctgctctgatccctgcaaaagctcgccacctccttacagtcaccgctgaactcgtagcagaggttcaggagg

SEQ ID NO: 247 - DNA, 338 bp, Homo sapien
  misc_feature (1)...(338): n = A,T,C or G
ggaaaccgtgtgtacttatcctggatgatgccaccagtgccctggatgcaaacagccagttacaggnggagcagctcctgtacgaaagccctgagcggtactcccgctcagtgcttctcatcacccagcacctcagcctggtggagcaggctgaccacatcctctttctggaaggaggcgctatccgggaggggggaacccaccancagctcatggagaaaaaggggtgctactgggccatggngcaggctcctgcagatgctccagaatgaaagccttctcagacctgcgcactccatctccctcccttttcttctctctgtggtggagaaccacag

SEQ ID NO: 248 - DNA, 177 bp, Homo sapien
tgaaaacaaatgaattctcaactcctacggttcatgtagagtttagagaaaatttccatcattgtcatcattgaactgtgaacctgggaagccagatcatgattaacactgacatcaagtttcaagttgcagatcaatgcacccagtgttcagatgaggcaaacttctccgtgacaa

SEQ ID NO: 249 - DNA, 263 bp, Homo sapien
aaagtaatgactttattaataaatatacatccatatgatgatgtagatacaaatcatgaacactactccattcccatacacataattgcacacgagtagctcaagttcatggacataaaaacatacacagtatctattcagactttttacagcagaggacagcgtgcttattatcagttaattggtaattattttctccaaaattacctgtggaaaaaagaaattctgaaaacttaaaagaatcaaagtgatctgattacttt

SEQ ID NO: 250 - DNA, 333 bp, Homo sapien
aaaaaaaacaacagcgtaaatattagcccacaagagcagtcctaaacaatcacaattacactgtactacccaagaagactgtttattgtgaagcatttacctttcaaaaaatcattacatttctatttcttggtggagcagcacattgtggagtgtgattcttaattcttcattgagtttgtcaataggacattgatgctggataggttgtcttttgtttttatgcctcagaccatcttgtgagattgtttgcctatctcataatacagttttatgcagaaaggttgaaactatgtaaatggtttttatggaaattatcagttacaatatttt

SEQ ID NO: 251 - DNA, 384 bp, Homo sapien
aaaccatttgtacaaaacttctataaatttttctctctctttctctcttatgtacaaaaatatcttaatatatccccgaactggttaggatagatacaaatagattttttataataaaaaattcacaaaagattggaagcattctataatgaaaatggtagaaaagacagtgtgagggaagccatggggtttgggaatcgggccctggaggagaagcagagtttcaaagggctgagaatagcatagtttcactgtaaaccaatgtctacagcttattggggtgggggctactgagacgaaagacaccaactcgtttctagagggctaagaactgcactttaagaaagggcggggaggtgaagggacccgagcaagaactttcag

SEQ ID NO: 252 - DNA, 211 bp, Homo sapien
aaagcagtctgaaaatgggacatctgtagagaaattcatttccttcttctcctccggatgtggaatggaagctttgagggaaggaaaagtaggaaaagagcgggatgggatgggatgggatgggatgggatgggataggaagagaggctggggaatgggcagagaagggggtgctgagtgtgctgtgagatagagcaagatcacaagaagg

SEQ ID NO: 253 - DNA, 135 bp, Homo sapien
aaaaattgtttcttgacaagctgacttggcacttaagtgcacttttttatgaagaaaaagtacaatgaactgcttttcctcaagcaataattgtttccaacttgtctgggaattgtgtgtctggtaactggaagg

SEQ ID NO: 254 - DNA, 361 bp, Homo sapien
cctgtagcccctgctacacgggaggctgaagtgggaggatcacttgaaccaatgagggtgaggttacagtgagcccagatcatgccactactctacaggctgggtgataagagtgagaccctgtatcaaaaaaaagacaaggaaaaaaaaaactgggccgtttgtttttgcagaatgtctctcaatttggactttttgggcaggaatacaatacaagtgatacaaatgcttctttaacattagaacctgtataaaattaccattacagaccttgctattttacttataggtaaatcactgtttaccaaggtaagtcttttgggaatttccaaaaatgaagtccatggacagttaaaaactg

SEQ ID NO: 255 - DNA, 331 bp, Homo sapien
aaaaaaataaataatccaccaacgtgattgaccttggcgagatcatgtttctagtctatacctcagtttccccatctgtaaagtgaggataatgtcccaccccatgtaactgtggtgaggaccaactgcaacactgtgcctgcgagtctccttggaaaagtgtaaggttctacacaaatggaaagtgatctgatcacactcagtgtccccagcccagcctttcagtgccctggccctggggtgggggacaatactctcctcacccccttcactagtcttcatgaatagcaaggaggccataacataatttggtctaaaccccttccttttt

SEQ ID NO: 256 - DNA, 186 bp, Homo sapien
  misc_feature (1)...(186): n = A,T,C or G
cctttgggcccttgcactttgacctgcaatggggccacaccagccttgcttgtgtccacctggaaggactgagggaggttggcacgaaccatgcctgggctcaggccgggcccanagcacttgaccttggacgcatctgtcacatcatgcacagggaccttgaaaggactgcctggcacttgatgg

SEQ ID NO: 257 - DNA, 255 bp, Homo sapien
ctggggtccgtcaccgacctttggggaactgggctacggggaccacaagcccaagtcttccactgcagcccaggaggtaaagactctggatggcattttctcagagcaggtcgccatgggctactcacactccttggtgatagcaagagatgaaagtgagactgagaaagagaagatcaagaaactgccagaatacaacccccgaaccctctgatgctcccagagactcctccgactccacacctctcgcggcag

SEQ ID NO: 258 - DNA, 604 bp, Homo sapien
ctgaatttgcaatggagtttggtggtgcaatcggtattgattagtttggcatagacagatgcagcagtttagagcaaaatcgagaaaatgattttttttttcctccttgatttcctggcagaagatatcttactttttcagcaaacttttcttttaacactaaagcagcctagggcaatgccagatacttagagcttttctcttgattataagtagaaatgggggtgtctgggctagaggtggagggtggatgtgctgtcgtcacagtctagctggcagcaagcaaggcaaaagcagagactgctctagaagcggttccaagcagcagagacgtcaggaaaggcacttcttagtaccaacctctatgctttaatagttgcttgttaagctgcttcatgggttgagacaaactaccagcacttcaaagagctcagttctctgctcaactctcttctctagttacattattttttttccttcaggagactgaggcaggaaaatcgcttgaactcaggaggtcgaggccgcagtgagccaagatcacaccaccgcactccagcctgggccttgcaaagtgctaggattacaggaatgagccaccagg

SEQ ID NO: 259 - DNA, 429 bp, Homo sapien
aaaaatgtctgtatcgagatcttccagtttgaagtcttcctcctctgtgtcttcccaaggctctgtggcaagctccactggttctcccgcttccatcagaaccactgacttccacaatcctggctatcccaagtacctgggcaccccccacctggaactgtacttgagtgactcacttagaaacttgaacaaagagcggcaattccacttcgctggtatcaggtcccggctcaaccacatgctggctatgctgtcaaggagaacactctttactgaaaaccaccttggccttcattctggcaatttcagcagagttaatttgcttgctgttagagatgtagcactttatccttcctatcagtaactgctccgtgttcagactcctggtttcttccaggcttacagtggacatcatcagcttcctgcttt

SEQ ID NO: 260 - DNA, 385 bp, Homo sapien
  misc_feature (1)...(385): n = A,T,C or G
ctgcaacacatgcagcaccagtctcagccttctcctcggcagcactcccctgtcgcctctcagataacatcccccatccctgccatcgggagcccccagccagcctctcagcagcaccagtcgcaaatacagtctcagacacagactcaagtattatcgcaggtcagtattttctgaanacgcatatggcagacggatttgcgtataccaaggagagtggcataggagggaaaagcatatgtggctgaaacctgtaagttggtgttggttatgcagaaatgtgtaacagatcaaacggtcctctcaagtgtctattanataggcaataagaactgcagtgtagctgagtaacatcttttagctgactataaatcactttgttttt

SEQ ID NO: 261 - DNA, 230 bp, Homo sapien
ctgtactggatccctccaggtgggggcgactctcacctgactattacaatagcctcctaagtggtttccctacttgcaaccttgcccgtataatatctatcctccacacagcaggcagggcgatcctttaagaatagaagttagatcatgaaaatgctctgctctgatccctgcaaaagctcgccacctccttacagtcaccgctgaactcgtagcagaggttcaggagg

SEQ ID NO: 262 - DNA, 198 bp, Homo sapien
  misc_feature (1)...(198): n = A,T,C or G
atgttaagtaaacatgaaatctatataacagaacaaaaattcactcttatgtcaatgtcagcgtgttaatgtagatctatttactganacagactctgtagtggcagagagtggccttgttaagccaggaccctgttctgcaggctgtgggtagaagctaggaagtccctggagtttcacccagcttttccatgaatg

SEQ ID NO: 263 - DNA, 157 bp, Homo sapien
aaaatatatttctaaacagaatgggccgactcagtcacagtaactgttgatctccatagtagagcaacccacaaagacagaactgatttttttcccataatcaggggtgaaaaatatacaacttgtttctgaaccaaaaccacaatttctgcagttt

SEQ ID NO: 264 - DNA, 290 bp, Homo sapien
ctggctactccaagaccctggcatgaggctgaggacaacttacaagggcttcaccgaagcagtggacctttattttgaccacctgatgtccagggtggtgccactccagtacaagcgtgggggacctatcattgccgtgcaggtggagaatgaatatggttcctataataaagaccccgcatacatgccctacgtcaagaaggcactggaggaccgtggcattgtggaactgctcctgacttcagacaacaaggatgggctgagcaaggggattgtccagggagtcttgg

SEQ ID NO: 265 - DNA, 234 bp, Homo sapien
aaaaaaaggaaaggaaagagaggaaaagaaaataaaataagacgatttattgcttctcctcagcatcctccttggtctcctccttcaccgagagagcttctagcttttccgccactttttcggcatgatcatttttgcctgatcctttcttttctctctcttcgatctctttcctgcattcttcaaactttgttttgaatttctgtgcattctcagcattcaggaagcggatgg

SEQ ID NO: 266 - DNA, 335 bp, Homo sapien
gtcctcatcatcccagtttgaggcagtgctggagtggggaaggccgtcttagaccatagaggttggaagacgctgagagatcatccagcccagccccttgatgttacagagcagaagacagatgcccaaacaggagaaggcacttgcccacggtcatacggcaggttgccacaaaaccaagatggcagcccttcctcagcgtgcctcactgccactcccagagccagggagccccataaaacccacatcatgtcttaagagtatatctggctccttgaccagcaatcggccctgggagccaccaggtgggaaaagcgcctctgccagagtccagg

SEQ ID NO: 267 - DNA, 619 bp, Homo sapien
  misc_feature (1)...(619): n = A,T,C or G
tggagctctgacgaagggatcggggaggtgctggagaaggaagactgcatgcaggccctgagcggccanatcttcatgggcatggngtcctcccagtaccaggcccggctggacatcgngcgcctcattgatgggcttgtcaacgcctgcatccgctttgtctacttctctttggaggatgagctcaaaagcaaggtgtttgcanaaaaaatgggcctggagacaggctggaactgccacatctccctcacacccaatggtgacatgcctggctccgagatccccccctccagccccagccacgcaggctccctgcatgatgacctgaatcaggtgtcccgagatgatgcanaagggctcctcctcatggaggaggagggccactcggacctcatcagcttccagcctacggacagcgacatccccagcttcctggaggactccaaccgggccaagctgccccggggtatccaccaagtgcggccccacctgcagaacattgacaacgtgcccctgctagtgccccttttcaccgactgcaccccanagaccatgtgtgagatgataaagatcatgcaanagtacggggaggtgacctgctgcctgggcanctctgcca

SEQ ID NO: 268 - DNA, 147 bp, Homo sapien
cctataacccagacaccagcatggacaaaactcagttatactgaattcagagacaaaattcagtgacactcttctaccacttatttagggttctacagcatttcactgagcagacttagttttttgtttttgttttacaaacctttt

SEQ ID NO: 269 - DNA, 325 bp, Homo sapien
ctgagctgtaggaatgggttcttggtacacaagatagtattgttgagctagttttcgagctctgtgcacaagcactctgtaatcggggcccatgccactgtacaccaaacctatatgcttggtaattggttctactttgtgtacacttcgctcatcatacagaatggatttctgttttttctcagttgctaataccacaccatttgcagctttaattcccacggacggggctcctccagctacagcagccaaagcatattcaatctggacaagtttaccagacgggctgaatgtagtcagcgaaaagctgtacccgcgctccgcc

SEQ ID NO: 270 - DNA, 428 bp, Homo sapien
aaacatatggtaaattaccgagtgacacctctgggctagagacctcttttgaggggagtttgcaaactacggattcaatttctttaacagttatgaagttctttaaagaacctgtttggtattggggggttgtggtcacctgtgcttttctgagatttggcccctacatctaagttgttgaatgcatgtgtgtagagttgtttatggtgcttccctttcttcttagaagggtctatagtaatatcccctgccttatccctagtagtactaatttgtgttttcttacttcttgacaggcaaacacatcagagcataagtggttcctaatgccaagctgacctcccttgatctctgtcttctacaggatattgacatgggacttctttattaccttttcagttcactgataccttcaaatagctttattt

SEQ ID NO: 271 - DNA, 206 bp, Homo sapien
  misc_feature (1)...(206): n = A,T,C or G
cgtcccggagcccacggnggncatggctggcanagcgctctgcatgctggggctggtcctggccttgctgtcctccagctctgctgaggagtacgtgggcctgtctgcaaaccagtgngccgtgccagccaaggacagggtggactgcggctacccccatgtcacccccaaggagtgcancaaccggggctgctgctttgactcca

SEQ ID NO: 272 - DNA, 83 bp, Homo sapien
ctggcttccctgagaactcaacaatgccttttcctgagggccttcctcgatcatccacaatgactacagccctctctacctgg

SEQ ID NO: 273 - DNA, 472 bp, Homo sapien
ctggagaaggtgtgcaggggaaaccctgctgatgtcaccgaggccaggttgtctttctactcgggacactcttcctttgggatgtactgcatggtgttcttggcgctgtatgtgcaggcacgactctgttggaagtgggcacggctgctgcgacccacagtccagttcttcctggtggcctttgccctctacgtgggctacacccgcgtgtctgattacaaacaccactggagcgatgtccttgttggcctcctgcagggggcactggtggctgccctcactgtctgctacatctcagacttcttcaaagcccgacccccacagcactgtctgaaggaggaggagctggaacggaagcccagcctgtcactgacgttgaccctgggcgaggctgaccacaaccactatggatacccgcactcctcctcctgaggccggaccccgcccaggcagggagctgctgtgagtccag

SEQ ID NO: 274 - DNA, 205 bp, Homo sapien
ccaggcggcccgaggacttacggtcggcacttctctgttctcccgtgtcagcgtgtggtgtcgcctgcatgggtcgtacctggatggtgtgtccaccatcgacacggaggggctggatttgtttctcaggcaatcctgtattttaattttagatgtatttcctgaagcatatttttcatagaatgtagcgtgtaaatagcttttt

SEQ ID NO: 275 - DNA, 308 bp, Homo sapien
ctcctcgccctccccaccgacatcatgctccagttccagcttggatttacactgggcaacgtggttggaatgtatctggctcagaactatgatataccaaacctggctaaaaaacttgaagaaattaaaaaggacttggatgccaagaagaaaccccctagtgcatgagactgcctccagcactgccttcaggatatactgattctactgctcttgagggcctcgtttactatctgaaccaaaagcttttgttttcgtctccagcctcagcacttctcttctttgctagaccctgtgttttttgcttt

SEQ ID NO: 276 - DNA, 201 bp, Homo sapien
aaattaactttttcttgcaaaatattcatttcattttttccaagaaaatcttataaaggcaaaaataaaattttattttggcaaatgtcatgaagtcgatactggcagcatatggagttagttaaaaatagacaacaactgctagatatattcaaaattctatttttttttctgagcatagtcaaagagaaattttcattt

SEQ ID NO: 277 - DNA, 520 bp, Homo sapien
  misc_feature (1)...(520): n = A,T,C or G
aaaaaaaaagtattcagcaccatttgctcatnggtctttcagagtttgttcttaaagtttctggaactttcctgtctgtaaagtaacaggaattactgagctacattggaaagcctctctgggacaggcagtggggagttaagcagtcatcataaaggaatcagtgtacattcagcatggtgacttgactacacaacaatcccttcccctctactgtagctcaagagagacatgcttctaaccactgaggtatgaggagtctcagactgttatttgctgttagaattggtcttcccagctaataacagtacatctctggcacagatgctattggtccttaatgtcctgtgattttaggaaatagtttggatttagttcaatttattcagaaaccaaacgtgtttaattagcttcactactctggcagagtaagggtatgctggtttagtatctttataaaatatatataatgtataggtaaatcatagtcttaaatcatacctaaaatactgtatcattt

SEQ ID NO: 278 - DNA, 264 bp, Homo sapien
cgcgccgggcggaactttccagaacgctcggtgagaggcggaggagcggtaactaccccggctgcgcacagctcggcgctccttcccgctccctcacacaccggcctcagcccgcaccggcagtagaagatggtgaaagaaacaacttactacgatgttttgggggtcaaacccaatgctactcaggaagaattgaaaaaggcttataggaaactggccttgaagtaccatcctgataagaacccaaatgaaggagagaagttt

SEQ ID NO: 279 - DNA, 414 bp, Homo sapien
aaacatacaataatttttattatggaaattaatctttacatacaaaatcagctacgtaattttacttacaaaacaataaaaactgttctttactgtggcaacaaaagaagcattttgacaaatgaaaaaaattaatgcaaacaaattaaaacaatgcttttctttttacttgcttcactgtctcttctatttattttctatgatcatttgacacaaacatggattactttgatatctactgaaacataaatgataaggttcttaaaggttgaattaaaagtctgggtgttcaatattttagaagctgaataaacaaaacgaaattggggtttgtgattacagaggatttatcattttttccctttgtccatatgaaaatatataatagaaaattacccacgggaaaacattttt

SEQ ID NO: 280 - DNA, 262 bp, Homo sapien
ccaccatgcctggcctgcttcaattttttgatgccactttgtaaacggcacttaattatggaaaataggaaaaagcaaaactaaaataaggaagaggatatatatataacttttcacaatctcttttctgatcccctttagatgcccagtcaaccaggaccacacacagatttcattttatttgtagagtatatgaaaagatttaatagtctcatgcattttattttacgtatactgatttctacgttttgactgactattt

SEQ ID NO: 281 - DNA, 349 bp, Homo sapien
ctgtgacccgggtgcatcagtggatatagttgtgtctccccatgggggtttaacagtctctgcccaagaccgttttctgataatggctgcagaaatggaacagtcatctggcacaggcccagcagaattaactcagttttggaaagaagttcccagaaacaaagtgatggaacataggttaagatgccatactgttgaaagcagtaaaccaaacactcttacgttaaaagacaatgctttcaatatgtcagataaaaccagtgaagatatatgtctacaactcagtcgtttactagaaagcaataggaagcttgaagaccaagttcagcgttgtatctggttccagcag

SEQ ID NO: 282 - DNA, 381 bp, Homo sapien
  misc_feature (1)...(381): n = A,T,C or G
aaacactaaatgaagcttctcacaatttctaattataaacaaaaggctgaaaacagtatgggaaacaaagtttcaaaacaaagaaaagttgagtaaaaggtgccccctctatggctcatctgaaagaaacattttactcagagaggcaaacatttctgatctaggagtaagtttcccactcactttgcaaggacccactcattctgcanaaagacctacaagtctttctggtctcaattgcaaagtacgtgaaaatgtgtatgaaagatctaaaagctaaatattagaataaggctaattgaaatcaaaattgtgtgctggtctaaatatacatcttcggcttcttcctttttagtaagtatttttatttcagatgtattt

SEQ ID NO: 283 - DNA, 543 bp, Homo sapien
aatatagctcctccctacccccaacaatggaccctgcccattgcctcccagttccttgatcttcctaggttccacaactctctttttccttttagttttattccctccagccaaacctctcttattcaatattttgagccaatgggggagttatgtagatttttttccctacacattagctggccccttttatgaccaatgactcataaggcaagatgtgtggtggcatcttcggacaggcagcaggctttaatagggcagcctgggttggtggaggcaagcaaagctaattggcatgcgtgggaatcaaaccccaggccctgggctcattagcccatggtcaaaacaactgagccagaggaggtaataatttgcccaagaatatcagtagttcctttattagaagaaaatggctgatatggaagttggggaatctgaattgccagagaatcttgggaagagtaataagctcttagtctcaacaaaaagtgttttttcatctcagcgcgtaaagggtgctatatgggaacaaagaagtatttt

SEQ ID NO: 284 - DNA, 147 bp, Homo sapien
aaactggtattttatctttgattctccttcagccctcacccctggttctcatctttcttgatcaacatcttttcttgcctctgtccccttctctcatctcttagctcccctccaacctggggggcagtggtgtggagaagccacagg

SEQ ID NO: 285 - DNA, 316 bp, Homo sapien
cggccgaggtctggcttcactcctactccctctctgctcgcagcacgtcggccgccagctctttgatgtgttcccaggcccgctgcacatgggcagattccaccgtgcgagaacagatggcaaagcgcaggacaaacttgtccctgaggtgacatggaaccaagtggatttttttggcactgtttattctttgcagaagagcttcattcactttgttggaaccctttagccgaaagcagacaagccccagaatgacttccacacagatttcaaagcggggatcctggcgcaccagtgactcaaactcatgggacag

SEQ ID NO: 286 - DNA, 322 bp, Homo sapien
cctggggagccctttagtggggtgggacctcaggcagacccccaaaccaaagggagccagatgcccaagttcaagtcattagtgatatgtggcagggctgacagagaaataatcctggaggtctccaaagctgctgggaatggaatggcgatgaaaagcgcaggagtgggcagggtgtggtgggtgatggtggcctcactcagagtggaccaaggccccagctccttgcccaaaaccaaagcccttgggcccgaagtttttagcataacatcctttgcagtaaatctcgccatccttgtctgccagggtggttgactcaagg

SEQ ID NO: 287 - DNA, 364 bp, Homo sapien
ctgcccacgctcaaaccaattctggctgatatcgagtacctgcaggaccagcacctcctgctcacagtcaagtccatggatggctatgaatcctatggggagtgtgtggttgcactcaaatccatgatcggcagcacggcccaacagttcctgaccttcctatcccaccgtggcgaggagacaggcaatatcagaggctccatgaaggtgcgggtgcccacggagcgcctgggcacccgtgagcggctctacgagtggatcagcattgataaggatgaggcaggagcaaagagcaaagccccctctgtgtcccgagggagccaggagcccaggtcagggagccgcaagccagccttcacagagg

SEQ ID NO: 288 - DNA, 261 bp, Homo sapien
aaaattataactactcattctttctttagccttagttaatttgagcagaagccacaacaagcaaaccacaataaatttagaattggcagaaatccacattaactcctcttcccaagtttccacactactaccatttacagttgtaggtttgtaatgtataattatgtaatgcagaaactagctttgacttgtgtaacgatgcactgtcaaagtaagcaaagtaagaattgaaattccacattcccagaatttaacactcag

SEQ ID NO: 289 - DNA, 261 bp, Homo sapien
ctgagtgttaaattctgggaatgtggaatttcaattcttactttgcttactttgacagtgcatcgttacacaagtcaaagctagtttctgcattacataattatacattacaaacctacaactgtaaatggtagtagtgtggaaacttgggaagaggagttaatgtggatttctgccaattctaaatttattgtggtttgcttgttgtggcttctgctcaaattaactaaggctaaagaaagaatgagtagttataatttt

SEQ ID NO: 290 - DNA, 92 bp, Homo sapien
ccactacccgaacttacaggtgccaaaagaagaaagggtataaacggagaccacctatcactcatcagaacctaggatcatcacattccttt

SEQ ID NO: 291 - DNA, 287 bp, Homo sapien
ccatggctccgctcagggccccggtcacctccgagtcactctgttccttgactgtctttgtgtttctgtacctcaaggcactgaagctggaggactctgtccatgcctgtgtcaccctcgtgtgggagcctctgggctcggcaggtccacatttcatgagctgaggcgtgggccagggccatctggaaagggaactcggcttttccagaacgtggtggatcatctgtcgggtgtgtggtgaacacgttcagttcatcagggcctacgctccgggaaggggcccccag

SEQ ID NO: 292 - DNA, 270 bp, Homo sapien
ccattgtttcctcgctggcgaaggctccttgaacatccctcaccttcctctcccgcctctgccttctgctgggtcaaaggtggccttttctctccagccttgaattgttccctgttggcttcccaagggcccatctgctggtacagtccacacttccacagccaagacccgagagggctttcactgccccaagcctctctcctgtgaccctgggattctgtcttggcagaatcctttgtcagcggctcttactctgtccttcctgtttgg

SEQ ID NO: 293 - DNA, 333 bp, Homo sapien
ccatgctcgtcaacctggtgtccactgcttgctacgtctccttcctcttcctgggctgcgacactggccctgtggctggggttactgttccctatggaaacagcacagcacctggctcagccctggacccctactcgccctgcaataataactgtgaatgccaaaccgattccttcactccagtgtgtggggcagatggcatcacctacctgtctgcctgctttgctggctgcaacagcacgaatctcacgggctgtgcgtgcctcaccaccgtccctgctgagaacgcaaccgtggttcctggaaaatgccccagtcctgggtgccaagagg

SEQ ID NO: 294 - DNA, 123 bp, Homo sapien
ctgatacaaatacagaaaactctgcccattatccaagaaacaaataattaagactaaaatgcaagctgatgtgttgcagcattgtagggccactaaatagccatctgtgattcgtggcaattt

SEQ ID NO: 295 - DNA, 311 bp, Homo sapien
ctgcatacagacatttgtttaggtcatctggattatcttgattgtcaccatggcaactatccacaaccagtgcctaggtgtgtgagaagagtgatacaataatactgtggcatggtcatttagctaatccagtctaagcctaacagaaaccttttccatcaaagtttttcagagaataacaacatctcataagaggccagaggatggcttgtgcttaatatcacacctgtacagtagggcagtgcttcccaggctgtctgcttacattttagcttgtcttacggttacatatggttttagtattttcattt

SEQ ID NO: 296 - DNA, 241 bp, Homo sapien
ctgcggaagatctgcaaccacccctacatgttccagcacatcgaggagtccttttccgagcacttggggttcactggcggcattgtccaagggctggacctgtaccgagcctcgggtaaatttgagcttcttgatagaattcttcccaaactccgagcaaccaaccacaaagtgctgctgttctgccaaatgacctccctcatgaccatcatggaagattactttgcgtatcgcggcttta

SEQ ID NO: 297 - DNA, 295 bp, Homo sapien
aaacacaagatgaaaatactctgttctgtccaaagcatcacctaatggtgtgaggcatctcacttagctgtggagaagtccttggaattagatctcagaaagacagctttaagacagtaaaaccttttggcaatgggctaattgccttaaaagaagagttctacctgaaagaccttgcaggtggagaaattgtcctacaaagattcttggatatgttagtggagataactgacatgggtagctgtgggtcaaccaggaactgtcaacaacctgatctctgcaaaaccaggatgga

SEQ ID NO: 298 - DNA, 347 bp, Homo sapien
ccaaaataaagcttcaggcaagaggcaaagatccagtggaatatgggagaatggtggaggaccaacacctgctaccccagagagcttttctaaaaaaagcaagaaagcagtcatgagtggtattcaccctgcagaagacacggaaggtactgagtttgagccagagggacttccagaagttgtaaagaaagggtttgctgacatcccgacaggaaagactagcccatatatcctgcgaagaacaaccatggcaactcggaccagcccccgcctggctgcacagaagttagcgctatccccactgagtctcggcaaagaaaatcttgcagagtcctccaaaccaacag

SEQ ID NO: 299 - DNA, 268 bp, Homo sapien
aaaaagtaaacatgaaaacatcacgaattgtaccatgattcaagaataacttttgtaatagaaaacacatgaccttttgcagtatagtgtgataccgaagtaaaagtgaaagaaataaatgcaggaaagtttaagtggatgtaagtttttataaggaaagtaataagaggaggctgcttttgaaggtcctttgatcttccatgatgataatatcgttgcaaagttctttaacttgtattcaagtaattagcagttgaccacttggttt

SEQ ID NO: 300 - DNA, 185 bp, Homo sapien
aaattggagaaggaagttttcctgaagagccagaatccttgctaagtcatttagatccaactgaccatctttatttctgtcaaaaatcttcatcatggtgccggtgtattcttccagtttagcctcagaaatggcctttctgtggtgaagaaagaggtctcggaggaagttgcggagctcagcag

SEQ ID NO: 301 - DNA, 75 bp, Homo sapien
aaaattggaaagtgggataagaaatctaaagtaaccagcttatctttgaaacaatattattttgaaattggcttt

SEQ ID NO: 302 - DNA, 247 bp, Homo sapien
  misc_feature (1)...(247): n = A,T,C or G
ccatgttctctgaattgggtgcagaagacaagggcagagtggctgcggcccctattacctttgtagcagccacatcagaaagcagaagaaaacagtatttctgaaggcattgtttgaggttgatctcagcactgaacgatttcaagccctacgcaccanaacagaaggagggtggaggaagtgatcanagggaacgagctgtaggtttgcanaaatgtgtgaaaccaaaatgatcactgcctacttg

SEQ ID NO: 303 - DNA, 535 bp, Homo sapien
ctgcttcagaggaaatcactgaaaaataaagaaaaaccatccatgcatggctgcatccagtgtacctgtaatcctgaagaaaaggtcctaattccttccatgctgaaatgctagctttggtttcagagagagactttattgcaactgtgaccaccgtcactggtgagcactgctgttcggcccccagcggacttaaaagactggaatgtggtagtggcggtcgttctcggtcagcagggagatctccggccagtccctgagaggctcctctgggtagcagacttcaaagtctctggagttaaacttgaacagtctgaacacttttatctttacttcaagggagtatccaagtataaacatatcaatctgctctagtccacatgtgtcgcctacagaattcaggtgattcatcatgaagctcaaaggatcagaggatgtctccctggaaaacaggagtctaaaaagactgggaatgacctttttagtcttcatttgttcataaacttcagtgacttgatacagcatgatgaacttt

SEQ ID NO: 304 - DNA, 522 bp, Homo sapien
ccgcgctcggtctacaatcacgttttattattggctcgtctagtcatgggatagagaaggtaaatagcaaaatagaaagaaaagggggaaaaggtagaaggcaaggggaaaactattggttttagatctttatcctggtcctgtcaatgatcaggtaattggaaggatcaaaattaggccaaacttggtaattgggccaaaattgaaccaaagtttgtgtcaagaagacctggggcagagatatgtgactaaatcatttggaatatgcccagaccccaagaatatttatgcccaacttgaatgctaaccagaagtcccttactgtagaagattgtaaggttgctatttttttgccccgacaccaaaatattgatgtattttccaacaccaattctccaattctctgacaccaactcgatgttcaacaattcagttatattctgtcactaattcctgcagctatcagcaggccccacaggtaaaggattcagtctcacaagattgcccccccacccacttcag

SEQ ID NO: 305 - DNA, 165 bp, Homo sapien
cctaaagcgctcctcgctgaagctcaaggggtccacaatgatttgtttgtcaaagttattgagtgcatatgccagttctcctcctcctccaccctggtgctgtgaggcatcgtctgaggcagtggcctgggctgcattggaaatgcctgtgaccgcctgctgcag

SEQ ID NO: 306 - DNA, 294 bp, Homo sapien
ctgcacctaagacatggccctggctaggcgggaacagctcacagtagcgatacattcacaggacacagttggtgtccagaaaagggggctcagaacacagtttctacacaagcacttggcacccacacgacagagacgtcactcaagcagcacagccacaaatagtttacagcagctcatgcccggcatccgcccatgctgggagactccctgaaaggtgggcacctgccgtctatgaggaggtgtctccctccatcattaaccccaaaccacacaatgtgtgaggagagcagg

SEQ ID NO: 307 - DNA, 181 bp, Homo sapien
aaaaatccatgacaccttgatagaaattagagtttacacaaacaaaaaaggaaccttcgatattgccagcagctataaagtgaacgtactgagaccgacaggacagcaagaaggcatttgcacatttatatctgacacccgaccatactttcagtcaccagaatatcttctctccagattt

SEQ ID NO: 308 - DNA, 179 bp, Homo sapien
  misc_feature (1)...(179): n = A,T,C or G
aaggctgaggactgctgggagctcagatcagcccggagctactggctcatgggcagccaaaaaatactggatctgctgaacgaaggctcagcccgagatctccgcagtcttcagcgcattggcccgaagaaggcccanctaatcgtgggctggcgggagctccacggccccttcagcca

SEQ ID NO: 309 - DNA, 129 bp, Homo sapien
  misc_feature (1)...(129): n = A,T,C or G
ctgcccgcttgcccgtagctgactcagnttcctcatcttcatctccatcctcttcctcaccatcaccttcttcttcctcctcctcttcctccccaccttcttcctcttcttcgtctacctcattgtcag

SEQ ID NO: 310 - DNA, 390 bp, Homo sapien
tgaggctgggggagagccgtggtccctgaggatgggtcagagctaaactccttcctggcctgagagtcagctctctgccctgtgtacttcccgggccagggctgcccctaatctctgtaggaaccgtggtatgtctgcatgttgcccctttctcttttcccctttcctgtcccaccatacgagcacctccagcctgaacagaagctcttactctttcctatttcagtgttacctgtgtgcttggtctgtttgactttacgcccatctcaggacacttccgtagactgtttaggttcccctgtcaaatatcagttacccactcggtcccagttttgttgccccagaaagggatgttattatccttgggggctcccagggcaagggttaagg

SEQ ID NO: 311 - DNA, 355 bp, Homo sapien
  misc_feature (1)...(355): n = A,T,C or G
cctctctgtgctgctgaaggcagatcgcttgttccacaccagctaccactcccaggcagtgcatatccgcctgttgagaaatgccgtgtctagattgtggacaagagcctgcgtgattatgctatangganaaaaattcttcgagttccacccnanctcctctaaacatttggctcactcaaaacaaaaagncaccaatcttantactgctgaacttcatttatgtnacctaacattaaccntcgtaggaaaaccaaatagccctctcgtncangatatgttgctaaaggactaccntgttcaacacaacggctccggtgtgtgaactcctgtttgggtgattcccctactctca

SEQ ID NO: 312 - DNA, 498 bp, Homo sapien
ccattcttttgaatctaatctattatcaatagcatcctccataatatctttgataaaaggtgtccaccgagagagctgaaaagtttcttctgcagaccgatcctttcttaacggtttgccttgttgagattggggaacaatgggaacaccaaggtaactccagttacgaatcatgtcactctcattttctatctttacattctggatcaacctgtccaaattttcttccgtagttccattaatactgaagatataaagtagaattgctcttattttatcacaattatcatgatttttgttgagtagaactggaaggagtactcgcatggaatctttcaccttctgtccttctgcatcagttccaagtgccaggtcctgttcagttttgcagagcttttctatattaagcttgaacttattcatgcaatcttctgctaagttaagatggacaacttgcttagtaatctgttttcggaaatagggcatctttttcatcag

SEQ ID NO: 313 - DNA, 653 bp, Homo sapien
aaacttatcagatttttttaagttaggtaatttcaatccacagtggctccatatggttaaaaaaacaaaaacaaaaacgcatttaaggatacacgaagcagtgaaaacaaagccccagtattttcgctaaagtactggaaatacctgtttctaaaaacagctttatatttgtccactgcctagaatagctctcacccaaacctcaaaaataagagcagatagattttagaagcaagaaaaggtaaacagtgcccatattatttgagactggctctgctgccctccctaagccagtttacattctttgagattcttggagtgggtgagtcagggctgaagactgcacaggccatgtcccctgctccaactattcctcagaacgtcccaggtggagggagtggcctgtcgattttcactcattccatggagctctgtgtacatgaaaattcctccaagtgtggcttttgtcgaattcagagatacagcaagccacgcataaaacatggagtgtagagcactggtgtacctagcttagaaacaccctcggtgaatgtggtactgtggctcgaaaggaagcaagggacaggacccaggagactgggcggccaggctctcggagttccacacacacctgtgaagcccggccagcacag

SEQ ID NO: 314 - DNA, 513 bp, Homo sapien
ctggaagattttgctgcatttggcattatactgtaatttacagtatacaacatctggggactcagtactatcttagcacagactaacttctcccactccgtcagaggtggcaggtggcgggtcggtggggagggccttttctccccataaatgcctgaactttaatttataccatataagaaatcagtgaaaggtaaacaacaaggttaatgtaactctattataaattttgcattttttttctctgtgacatatacaagtatatttttgtttttggagctataaattatttaatttagcaatcttcaaagctcataaatttcaacttttcaaataagaaattttaacttcaaataagaagtctaggactttatggctattaattttactatcaaaatatccaagggactccattcaatgtaatagttataattcttctaaatatcatttgaataattctttgtggacgctagactcaagactatgctacatccaaacagtacatctataacc

SEQ ID NO: 315 - DNA, 222 bp, Homo sapien
  misc_feature (1)...(222): n = A,T,C or G
atttatattcaaggnatctcaaagaaagcattttcatttcactgcacatctagagaaaaacaaaaatagaaaattttctagtccatcctaatctgaatggtgctgtttctatattggtcattgccttgcaaacaggagctccacaaaagccaggaagagagactgcctccttggctgaaagagtcctttcaggaaggtggactgcattggtttgatatgttt

SEQ ID NO: 316 - DNA, 1633 bp, Homo sapiens
cgtggaggcagctagcgcgaggctggggagcgctgagccgcgcgtcgtgccctgcgctgcccagactagcgaacaatacagtcgggatggctaaaggtgaccccaagaaaccaaagggcaagacgtccgcttatgccttctttgtgcagacatgcagagaagaacataagaagaaaaacccagaggtccctgtcaattttgcggaattttccaagaagtgctctgagaggtggaagacggtgtccgggaaagagaaatccaaatttgatgaaatggcaaaggcagataaagtgcgctatgatcgggaaatgaaggattatggaccagctaagggaggcaagaagaagaaggatcctaatgctcccaaaaggccaccgtctggattcttcctgttctgttcagaattccgccccaagatcaaatccacaaaccccggcatctctattggagacgtggcaaaaaagctgggtgagatgtggaataatttaaatgacagtgaaaagcagccttacatcactaaggcggcaaagctgaaggagaagtatgagaaggatgttgctgactataagtcgaaaggaaagtttgatggtgcaaagggtcctgctaaagttgcccggaaaaaggtggaagaggaagatgaagaacaggaggaggaagaagaggaggaggaggaggaggaggatgaataaagaaactgtttatctgtctccttgtgaatacttagagtaggggagcgccgtaattgacacatctcttatttgagaagtgtctgttgccctcattaggtttaattacaaaatttgatcacgatcatattgtagtctctcaaagtgctctagaaattgtcagtggtttacatgaagtggccatgggtgtctggagcaccctgaaactgtatcaaagttgtacatatttccaaacatttttaaaatgaaaaggcactctcgtgttctcctcactctgtgcactttgctgttggtgtgacaaggcatttaaagatgtttctggcattttctttttatttgtaaggtggtggtaactatggttattggctagaaatcctgagttttcaactgtatatatctatagtttgtaaaaagaacaaaacaaccgagacaaacccttgatgctccttgctcggcgttgaggctgtggggaagatgccttttgggagaggctgtagctcagggcgtgcactgtgaggctggacctgttgactctgcagggggcatccatttagcttcaggttgtcttgtttctgtatatagtgacatagcattctgctgccatcttagctgtggacaaaggggggtcagctggcatgagaatatttttttttaagtgcggtagtttttaaactgtttgtttttaaacaaactatagaactcttcattgtcagcaaagcaaagagtcactgcatcaatgaaagttcaagaacctcctgtacttaaacacgattcgcaacgttctgttattttttttgtatgtttagaatgctgaaatgtttttgaagttaaataaacagtattacatttttagaactcttctctactataacagtcaatttctgactcacagcagtgaacaaacccccactccgttgtatttggagactggcctccctataaatgtg

SEQ ID NO: 317 - DNA, 4235 bp, Homo sapiens
gaatccaagggggccagttcctgccgtctgctcttctgcctcttgatctccgccaccgtcttcaggccaggccttggatggtatactgtaaattcagcatatggagataccattatcataccttgccgacttgacgtacctcagaatctcatgtttggcaaatggaaatatgaaaagcccgatggctccccagtatttattgccttcagatcctctacaaagaaaagtgtgcagtacgacgatgtaccagaatacaaagacagattgaacctctcagaaaactacactttgtctatcagtaatgcaaggatcagtgatgaaaagagatttgtgtgcatgctagtaactgaggacaacgtgtttgaggcacctacaatagtcaaggtgttcaagcaaccatctaaacctgaaattgtaagcaaagcactgtttctcgaaacagagcagctaaaaaagttgggtgactgcatttcagaagacagttatccagatggcaatatcacatggtacaggaatggaaaagtgctacatccccttgaaggagcggtggtcataatttttaaaaaggaaatggacccagtgactcagctctataccatgacttccaccctggagtacaagacaaccaaggctgacatacaaatgccattcacctgctcggtgacatattatggaccatctggccagaaaacaattcattctgaacaggcagtatttgatatttactatcctacagagcaggtgacaatacaagtgctgccaccaaaaaatgccatcaaagaaggggataacatcactcttaaatgcttagggaatggcaaccctcccccagaggaatttttgttttacttaccaggacagcccgaaggaataagaagctcaaatacttacacactgacggatgtgaggcgcaatgcaacaggagactacaagtgttccctgatagacaaaaaaagcatgattgcttcaacagccatcacagttcactatttggatttgtccttaaacccaagtggagaagtgactagacagattggtgatgccctacccgtgtcatgcacaatatctgctagcaggaatgcaactgtggtatggatgaaagataacatcaggcttcgatctagcccgtcattttctagtcttcattatcaggatgctggaaactatgtctgcgaaactgctctgcaggaggttgaaggactaaagaaaagagagtcattgactctcattgtagaaggcaaacctcaaataaaaatgacaaagaaaactgatcccagtggactatctaaaacaataatctgccatgtggaaggttttccaaagccagccattcagtggacaattactggcagtggaagcgtcataaaccaaacagaggaatctccttatattaatggcaggtattatagtaaaattatcatttcccctgaagagaatgttacattaacttgcacagcagaaaaccaactggagagaacagtaaactccttgaatgtctctgctataagtattccagaacacgatgaggcagacgagataagtgatgaaaacagagaaaaggtgaatgaccaggcaaaactaattgtgggaatcgttgttggtctcctccttgctgcccttgttgctggtgtcgtctactggctgtacatgaagaagtcaaagactgcatcaaaacatgtaaacaaggacctcggtaatatggaagaaaacaaaaagttagaagaaaacaatcacaaaactgaagcctaagagagaaactgtcctagttgtccagagataaaaatcatatagaccaattgaagcatgaacgtggattgtatttaagacataaacaaagacattgacagcaattcatgttcaagtattaagcagttcattctaccaagctgtcacaggttttcagagaattatctcaagtaaaacaaatgaaatttaattacaaacaataagaacaagttttggcagccatgataataggtcatatgttgtgtttggttcaattttttttccgtaaatgtctgcactgaggatttctttttggtttgccttttatgtaaattttttacgtagctatttttatacactgtaagctttgttctgggagttgctgttaatctgatgtataatgtaatgtttttatttcaattgtttatatggataatctgagcaggtacatttctgattctgattgctatcagcaatgccccaaactttctcataagcacctaaaacccaaaggtggcagcttgtgaagattggggacactcatattgccctaattaaaaactgtgatttttatcacaagggaggggaggccgagagtcagactgatagacaccataggagccgactctttgatatgccaccagcgaactctcagaaataaatcacagatgcatatagacacacatacataatggtactcccaaactgacaattttacctattctgaaaaagacataaaacagaatttggtagcacttacctctacagacacctgctaataaattattttctgtcaaaagaaaaaacacaagcatgtgtgagagacagtttggaaaaatcatggtcaacattcccattttcatagatcacaatgtaaatcactataattacaaattggtgttaaatcctttgggttatccactgccttaaaattatacctatttcatgtttaaaaagatatcaatcagaattggagtttttaacagtggtcattatcaaagctgtgttattttccacagaatatagaatatatatttttttcgtgtgtgtttttgttaactaccctacagatattgaatgcaccttgagataatttagtgttttaactgatacataatttatcaagcagtacatgaaagtgtaataataaaatgtctatgtatctttagttacattcaaatttgtaactttataaacatgttttatgcttgaggaaatttttaaggtggtagtataaatggaaactttttgaagtagaccagatatgggctacttgtgactagacttttaaactttgctctttcaagcagaagcctggtttctgggagaacactgcacagtgatttctttcccaggatttacacaactttaaagggaagataaatgaacatcagatttctaggtatagaactatgttattgaaaggaaaaggaaaactggtgtttgtttcttagactcatgaaataaaaaattatgaaggcaatgaaaaataaattgaaaattaaagtcagatgagaataggaataatactttgccacttctgcattatttagaaacatacgttattgtacatttgtaaaccatttactgtctgggcaatagtgactccgtttaataaaagcttccgtagtgcattggtatggattaaatgcataaaatatcttagactcgatgctgtataaaatattatgggaaaaaagaaatacgttattttgcctctaaacttttattgaagttttatttggcaggaaaaaaaattgaatcttggtcaacatttaaaccaaagtaaaaggggaaaaaccaaagttatttgttttgcatggctaagccattctgttatctctgtaaatactgtgatttcttttttattttctctttagaattttgttaaagaaattctaaaatttttaaacacctgctctccacaataaatcacaaacactaaaataaaattacttccatataaatattattttctcttttggtgtgggagatcaaaggtttaaagtctaacttctaagatatatttgcagaaagaagcaacatgacaatagagagagttatgctacattatttcttggtttccacttgcaatggttaattaagtccaaaaacagctgtcagaacctcgagagcagaacatgagaaactcagagctctggaccgaaagcagaaagtttgccggaaaaaaaaagaccacattattaccatcgattcagtgcctggataaagaggaaagcttacttgtttaatggcagccacatgcacgaagatgctaagaagaaaaagaattccaaatcctcaacttttgaggtttcggctctccaatttaactctttggcaacaggaaacaggttttgcaagttcaaggttcactccctatatgtgattataggaattgtttgtggaaatggattaacatacccgtctatgcctaaaagataataagaaaactgaaatatgtcttcaaaaaaaaaaaaaaaaaaaaaaaaaaaaaaaaaaaaaaaaaa

SEQ ID NO: 318 - DNA, 3347 bp, Homo sapiens
atcccttggaggcattcatggctgaagtggaggatcaggcagctagagacatgaagaggcttgaagaaaaggacaaggaaagaaaaaacgtaaagggtattcgagatgacattgaagaggaagatgaccaagaagcttattttcgatacatggcagaaaacccaactgctggtgtggttcaggaggaagaggaagacaatctagaatatgatagtgacggaaatccaattgcacctaccaaaaaaatcattgatcctcttccccccattgatcattcagagattgactatccaccatttgaaaaaaacttttacaatgagcatgaagagataaccaacctcactccacagcagttaatagatctccggcataagctcaatcttcgggtctctggtgctgcacctcctagaccaggaagtagctttgctcattttgggtttgacgaacaacttatgcaccagattcggaaatctgaatacacacagcccactccaatacagtgccagggtgtgcctgtggcattaagtggtagagacatgattggtattgccaaaacaggtagtgggaaaactgcagccttcatttggcccatgttgattcatataatggaccagaaggagttggaaccaggtgatggaccaattgcagtgattgtgtgtcctaccagggagctttgccagcagatccatgcagaatgtaagcggtttggaaaagcatataatcttcgatcagtggccgtatatggaggagggagtatgtgggagcaggccaaggcccttcaggagggggcagagattgttgtgtgtaccccaggtcgactgatagatcatgtgaaaaagaaagctaccaatcttcaaagagtctcttaccttgtgtttgatgaagcagatcgaatgtttgacatgggatttgagtaccaagttcgatccatagcaagtcatgttcgtcctgacaggcagactctcttatttagtgcaacttttcggaagaagattgaaaagttggccagagacatcctgatcgaccctattcgagtggtgcagggagatattggagaggcaaatgaagatgtgacacagattgtggagattctccattctggacctagtaaatggaactggcttacccggcgtctggtagaatttacctcttcagggagtgtcctcctctttgttactaaaaaagccaatgctgaagagctagcgaataaccttaaacaggagggtcataatcttgggctgctccatggggatatggatcagagtgagagaaacaaggtcatttcagactttaagaaaaaggacatcccagtcctggtggccacagatgttgcagcccgtggtctggacattccttcaattaagactgtcattaactatgatgtggcacgagacattgatacccacacgcataggattggccgcacaggaagagcgggtgagaaaggtgtggcctataccctactcactcccaaggacagcaattttgctggtgacctggtccggaacttggaaggagccaatcaacacgtttctaaggaactcctagatctggcaatgcagaatgcctggtttcggaaatctcgattcaaaggagggaaaggaaaaaagctgaacattggtggaggaggcctaggctacagggagcggcctggcctgggctctgagaacatggatcgaggaaataacaatgtaatgagcaattatgaggcctacaagccttccacaggagctatgggagatcgactaacggcaatgaaagcagctttccagtcacagtacaagagtcactttgttgcagccagtttaagtaatcagaaggctggaagttctgctgctggggcaagtgggtggactagtgcagggagcttgaattctgttccaactaactcagcacaacagggccataacagtcctgacagccccgtcaccagtgccgccaagggcatcccaggctttggcaatactggcaacatcagtggtgcccctgtgacctacccgtctgccggagcccaaggagtcaacaacacagcttcagggaataacagccgagaagggactgggggcagcaacgggaaaagagagagatatactgagaaccggggcagcagcccgtcacagtcacggagagactggcaatcggcatagcgatagtccacgtcacggagatggtggtcgccatggagatggataccgccatccagaaagcagcagccgtcatactgatggccatcggcacggggagaacagacatggaggaagcgcaggccggcatggggagaaccggggtgcaaatgatggtcggaatggggaaagcaggaaagaagcttttaatcgtgagagcaagatggagcccaagatggaacccaaagtggacagcagcaagatggacaaggtggacagcaagacagataagacagctgacggctttgctgtcccagagccgcctaaacgcaagaaaagtcgatgggacagttagaggggatgtgctaaagcgtgaaatcagttgtccttaatttttagaaagattttggtaactaggtgtctcagggctgggttggggtccaaagtgtaaggaccccctgcccttagtggagagctggagcttggagacattaccccttcatcagaaggaattttcggatgttttcttgggaagctgttttggtccttggaagcagtgagagctgggaagcttcttttggctctaggtgagttgtcatgtgggtaagttgaggttatcttgggataaagggtcttctagggcacaaaactcactctaggtttatattgtatgtagcttatattttttactaaggtgtcaccttataagcatctataaattgacttctttttcttagttgtatggccaggcagtccccattttaggagttggcttctgcaaattcaatccattgagctaactgttggggagcaatttggtagttgtagacatttgcagggaagggagatgtctgattctaaatgggagttgatgctcaggtccccagccaggtttgcatccagccctgagacatgtaggaaacacctttcagacccaggctctgaagattcccagaagccacaaggattgaagggaaaaggtgatcctggtaactgttccaggattgctccaggtttgagatggtattgctaaatttaaaattaaacaagaaacccaacaacagcttttaaagtgtcttctatctcattgtattttttttaacttgccccaatgatagaaaagtcttttgctgaaatgattttgatgatttttgtttatcgtttataaaaaggaaaagaaatatacaaactttgacttttgtgaaaaaaaaaaaaaaaaaaaaa

SEQ ID NO: 319 - DNA, 1814 bp, Homo sapiens
ggggagatgatccgagccgcgccgccgccgctgttcctgctgctgctgctgctgctgctgctagtgtcctgggcgtcccgaggcgaggcagcccccgaccaggacgagatccagcgcctccccgggctggccaagcagccgtctttccgccagtactccggctacctcaaaagctccggctccaagcacctccactactggtttgtggagtcccagaaggatcccgagaacagccctgtggtgctttggctcaatgggggtcccggctgcagctcactagatgggctcctcacagagcatggccccttcctggtccagccagatggtgtcaccctggagtacaacccctattcttggaatctgattgccaatgtgttatacctggagtccccagctggggtgggcttctcctactccgatgacaagttttatgcaactaatgacactgaggtcgcccagagcaattttgaggcccttcaagatttcttccgcctctttccggagtacaagaacaacaaacttttcctgaccggggagagctatgctggcatctacatccccaccctggccgtgctggtcatgcaggatcccagcatgaaccttcaggggctggctgtgggcaatggactctcctcctatgagcagaatgacaactccctggtctactttgcctactaccatggccttctggggaacaggctttggtcttctctccagacccactgctgctctcaaaacaagtgtaacttctatgacaacaaagacctggaatgcgtgaccaatcttcaggaagtggcccgcatcgtgggcaactctggcctcaacatctacaatctctatgccccgtgtgctggaggggtgcccagccattttaggtatgagaaggacactgttgtggtccaggatttgggcaacatcttcactcgcctgccactcaagcggatgtggcatcaggcactgctgcgctcaggggataaagtgcgcatggaccccccctgcaccaacacaacagctgcttccacctacctcaacaacccgtacgtgcggaaggccctcaacatcccggagcagctgccacaatgggacatgtgcaactttctggtaaacttacagtaccgccgtctctaccgaagcatgaactcccagtatctgaagctgcttagctcacagaaataccagatcctattatataatggagatgtagacatggcctgcaatttcatgggggatgagtggtttgtggattccctcaaccagaagatggaggtgcagcgccggccctggttagtgaagtacggggacagcggggagcagattgccggcttcgtgaaggagttctcccacatcgcctttctcacgatcaagggcgccggccacatggttcccaccgacaagcccctcgctgccttcaccatgttctcccgcttcctgaacaagcagccatactgatgaccacagcaaccagctccacggcctgatgcagcccctcccagcctctcccgctaggagagtcctcttctaagcaaagtgcccctgcaggcgggttctgccgccaggactgcccccttcccagagccctgtacatcccagactgggcccagggtctcccatagacagcctgggggcaagttagcactttattcccgcagcagttcctgaatggggtggcctggccccttctctgcttaaagaatgccctttatgatgcactgattccatcccaggaacccaacagagctcaggacagcccacagggaggtggtggacggactgtaattgatagattgattatggaattaaattgggtacagctt

SEQ ID NO: 320 - DNA, 3132 bp, Homo sapiens
ccgcagaacttggggagccgccgccgccatccgccgccgcagccagcttccgccgccgcaggaccggcccctgccccagcctccgcagccgcggcgcgtccacgcccgcccgcgcccagggcgagtcggggtcgccgcctgcacgcttctcagtgttccccgcgccccgcatgtaacccggccaggcccccgcaacggtgtcccctgcagctccagccccgggctgcacccccccgccccgacaccagctctccagcctgctcgtccaggatggccgcggccaaggccgagatgcagctgatgtccccgctgcagatctctgacccgttcggatcctttcctcactcgcccaccatggacaactaccctaagctggaggagatgatgctgctgagcaacggggctccccagttcctcggcgccgccggggccccagagggcagcggcagcaacagcagcagcagcagcagcgggggcggtggaggcggcgggggcggcagcaacagcagcagcagcagcagcaccttcaaccctcaggcggacacgggcgagcagccctacgagcacctgaccgcagagtcttttcctgacatctctctgaacaacgagaaggtgctggtggagaccagttaccccagccaaaccactcgactgccccccatcacctatactggccgcttttccctggagcctgcacccaacagtggcaacaccttgtggcccgagcccctcttcagcttggtcagtggcctagtgagcatgaccaacccaccggcctcctcgtcctcagcaccatctccagcggcctcctccgcctccgcctcccagagcccacccctgagctgcgcagtgccatccaacgacagcagtcccatttactcagcggcacccaccttccccacgccgaacactgacattttccctgagccacaaagccaggccttcccgggctcggcagggacagcgctccagtacccgcctcctgcctaccctgccgccaagggtggcttccaggttcccatgatccccgactacctgtttccacagcagcagggggatctgggcctgggcaccccagaccagaagcccttccagggcctggagagccgcacccagcagccttcgctaacccctctgtctactattaaggcctttgccactcagtcgggctcccaggacctgaaggccctcaataccagctaccagtcccagctcatcaaacccagccgcatgcgcaagtatcccaaccggcccagcaagacgcccccccacgaacgcccttacgcttgcccagtggagtcctgtgatcgccgcttctcccgctccgacgagctcacccgccacatccgcatccacacaggccagaagcccttccagtgccgcatctgcatgcgcaacttcagccgcagcgaccacctcaccacccacatccgcacccacacaggcgaaaagcccttcgcctgcgacatctgtggaagaaagtttgccaggagcgatgaacgcaagaggcataccaagatccacttgcggcagaaggacaagaaagcagacaaaagtgttgtggcctcttcggccacctcctctctctcttcctacccgtccccggttgctacctcttacccgtccccggttactacctcttatccatccccggccaccacctcatacccatcccctgtgcccacctccttctcctctcccggctcctcgacctacccatcccctgtgcacagtggcttcccctccccgtcggtggccaccacgtactcctctgttccccctgctttcccggcccaggtcagcagcttcccttcctcagctgtcaccaactccttcagcgcctccacagggctttcggacatgacagcaaccttttctcccaggacaattgaaatttgctaaagggaaaggggaaagaaagggaaaagggagaaaaagaaacacaagagacttaaaggacaggaggaggagatggccataggagaggagggttcctcttaggtcagatggaggttctcagagccaagtcctccctctctactggagtggaaggtctattggccaacaatcctttctgcccacttccccttccccaattactattccctttgacttcagctgcctgaaacagccatgtccaagttcttcacctctatccaaagaacttgatttgcatggattttggataaatcatttcagtatcatctccatcatatgcctgaccccttgctcccttcaatgctagaaaatcgagttggcaaaatggggtttgggcccctcagagccctgccctgcacccttgtacagtgtctgtgccatggatttcgtttttcttggggtactcttgatgtgaagataatttgcatattctattgtattatttggagttaggtcctcacttgggggaaaaaaaaaaaaaaaagccaagcaaaccaatggtgatcctctattttgtgatgatgctgtgacaataagtttgaacctttttttttgaaacagcagtcccagtattctcagagcatgtgtcagagtgttgttccgttaacctttttgtaaatactgcttgaccgtactctcacatgtggcaaaatatggtttggtttttcttttttttttttgaaagtgttttttcttcgtccttttggtttaaaaagtttcacgtcttggtgccttttgtgtgatgccccttgctgatggcttgacatgtgcaattgtgagggacatgctcacctctagccttaaggggggcagggagtgatgatttgggggaggctttgggagcaaaataaggaagagggctgagctgagcttcggttctccagaatgtaagaaaacaaaatctaaaacaaaatctgaactctcaaaagtctatttttttaactgaaaatgtaaatttataaatatattcaggagttggaatgttgtagttacctactgagtaggcggcgatttttgtatgttatgaacatgcagttcattattttgtggttctattttactttgtacttgtgtttgcttaaacaaagtgactgtttggcttataaacacattgaatgcgctttattgcccatgggatatgtggtgtatatccttccaaaaaattaaaacgaaaataaagtagctgcgattggg

SEQ ID NO: 321 - DNA, 2280 bp, Homo sapiens
ccgcccgccaccagctacgccccgtccgacgtgccctcgggggtcgcgctgttcctcaccatccctttcgccttcttcctgcccgagctgatatttgggttcttggtctggaccatggtagccgccacccacatagtataccccttgctgcaaggatgggtgatgtatgtctcgctcacctcgtttctcatctccttgatgttcctgttgtcttacttgtttggattttacaaaagatttgaatcctggagagttctggacagcctgtaccacgggaccactggcatcctgtacatgagcgctgccgtcctacaagtacatgccacgattgtttctgagaaactgctggacccaagaatttactacattaattcggcagcctcgttcttcgccttcatcgccacgctgctctacattctccatgccttcagcatctattaccactgatgcacaggcgccaggccaagggggaaatgctctttgaaagctccaattattggtccccaaaagcagcttccaacgtttgccatctggatgacaaacggaagatccactaaaacgtccacgggattaacagaacgtccttgcagactgagcgatgacaccacactttgtttggacatttaaattcactctgctgaataggaggaagcttttctttttcctgggaaaacaactgtctcttggaattatctgaccatgaacttgctcttctagacaactcacatcaaagccctcactccactaatggagaatcctagccccactaatgccaagtctgtttggggattttgcctcagctatgggcttccctagagtaggtctaggggaatactcagtctgatcttttttttgtttgttttattttgttttttttgagacggagtctcgctcttcctccaaggctggagtgcagtgacgcgatctccactcactgcaggctccgcctcccgggttcccgccattctcctgcctcagcctcccgagtagccgggactacaggcgcccaccaccatgcccggctaatttagttgtatttttagtagagatggggtttcaccgtattagccaggatggtctcgatctcctgacctcgtgatccgcccgcctcggcctcccaaagtgctgggattacaggcgtgagccaccgtgcccggcctgattctcttaaaattgaagaggtgctgccaaggccttcagatctaacgcagatgcatagaccttgttcctggtacttgttcagcctgtgctggggagccgtggtcccgagttccctgggaggctgacagggtcaagccaccctgcccaccaccctcccacttcccctcccctttcctctccagcattaggattcaagggaaatctgcatgaagccaattttgagggtagacgtgtggggaaaataaatcattatacagtaagacctggggcttgaggggtggggaatggggagggaagggcatagcctgctcctccatgagtctgacatctcggaaactgagcagctgccggacgcctgggtcaggaatccaagaccccacctcttaaggactggttcctcagaaagcaccctcagggaaaaaggtgaaaacattacatccgtggattctcctgccacaaccgcattggaagaaaaggctgccgcaacatctcagcgaggagtgaaggacccatgtcccaggaaccgcgctgcgccacctgcactcacccccctcacattctcttaagcacccggtggccctccgaggctggcggaatggtggtgcccacggggttgggcaagggctcaccaggacctcaacgggcaaagttgtgcacactaaaatatcaaatcaaggtgcttggttttaaagtaaatgtttttctaaagaaagctgtgttcttctgttgacccagacgaatagggcacagccctgtaactgcacgtgccttctgtcattgggaatgaaataaattattacgagaaagggacttgtcctaactggtttgaggccttacagttttgtatctacatttttcccctcctggggtttgcggggacagggacagaactacaggagtcatgggaaagaaaattctggcttcactactgctcactgctcactttctgatcactctgatactttttttttttttttttttttgcaacctgataccttgaaaagcttctatgtgtctctccttttgttgcctggcagctgtctaggatgatcactgattactatttactaagtagccacatgcaaataaaagttgtttggtaaaatggaaaaaaaaaaa

SEQ ID NO: 322 - DNA, 1398 bp, Homo sapiens
tagatggcaacctccctatctgcccgcaggtcatagaggcgacacgtagcgtcatctgaccctgaagcaaaggcatctccactccaaagttagacaaaatgccaggaatgttcttctctgctaacccaaaggaattgaaaggaaccactcattcacttctagacgacaaaatgcaaaaaaggaggccaaagacttttggaatggatatgaaagcatacctgagatctatgatcccacatctggaatctggaatgaaatcttccaagtccaaggatgtactttctgctgctgaagtaatgcaatggtctcaatctctggaaaaacttcttgccaaccaaactggtcaaaatgtctttggaagtttcctaaagtctgaattcagtgaggagaatattgagttctggctggcttgtgaagactataagaaaacagagtctgatcttttgccctgtaaagcagaagagatatataaagcatttgtgcattcagatgctgctaaacaaatcaatattgacttccgcactcgagaatctacagccaagaagattaaagcaccaacccccacgtgttttgatgaagcacaaaaagtcatatatactcttatggaaaaggactcttatcccaggttcctcaaatcagatatttacttaaatcttctaaatgacctgcaggctaatagcctaaagtgactggtccctggctgaagggaattaacagatagtatcaaggcacgaaggaatgtgccagtatggctccctgggtgaacagcttggccttttttgggtgtcttgacaggccaagaagaacaaatgactcagaatggattaacatgaaagttatccaggcgcagagttgaagaagcataagcaagacaaaaacagagagaccgcagaaggaggaagatactgtggtactgtcataaaaaacagtggagctctgtattagaaagcccctcagaactgggaaggccaggtaactctagttacacagaaactgtgactaaagtctatgaaactgattacaacaggctgtaagaatcaaagtcaactgacatctatgctacatattattatatagtttgtactgagctattgaagtcccattaacttaaagtatatgttttcaaattgccattgctactattgcttgtcggtgtattttattttattgtttttgactttggaagagatgaactgtgtatttaacttaagctattgctcttaaaaccagggatcagaatatatttgtaagttaaatcattggtgctaataataaatgtggattttgtattaaaatatatagaagcaatttctgtttacatgtccttgctacttttaaaaacttgcatttattcctcagattttaaaaataaataaataattcatttaaaaaaaaaaa

SEQ ID NO: 323 - DNA, 1316 bp, Homo sapiens
acttctacctgctcactcagaatcatttctgcaccaaccatggccacgtttgtggagctcagtaccaaagccaagatgcccattgtgggcctgggcacttggaagtctcctcttggcaaagtgaaagaagcagtgaaggtggccattgatgcaggatatcggcacattgactgtgcctatgtctatcagaatgaacatgaagtgggggaagccatccaagagaagatccaagagaaggctgtgaagcgggaggacctgttcatcgtcagcaagttgtggcccactttctttgagagaccccttgtgaggaaagcctttgagaagaccctcaaggacctgaagctgagctatctggacgtctatcttattcactggccacagggattcaagtctggggatgaccttttccccaaagatgataaaggtaatgccatcggtggaaaagcaacgttcttggatgcctgggaggccatggaggagctggtggatgaggggctggtgaaagcccttggggtctccaatttcagccacttccagatcgagaagctcttgaacaaacctggactgaaatataaaccagtgactaaccaggttgagtgtcacccatacctcacacaggagaaactgatccagtactgccactccaagggcatcaccgttacggcctacagccccctgggctctccggatagaccttgggccaagccagaagacccttccctgctggaggatcccaagattaaggagattgctgcaaagcacaaaaaaaccgcagcccaggttctgatccgtttccatatccagaggaatgtgattgtcatccccaagtctgtgacaccagcacgcattgttgagaacattcaggtctttgactttaaattgagtgatgaggagatggcaaccatactcagcttcaacagaaactggagggcctgtaacgtgttgcaatcctctcatttggaagactatcccttcaatgcagaatattgaggttgaatctcctggtgagattatacaggagattctctttcttcgctgaagtgtgactacctccactcatgtcccattttagccaagcttatttaagatcacagtgaacttagtcctgttatagacgagaatcgaggtgctgttttagacatttatttctgtatgttcaactaggatcagaatatcacagaaaagcatggcttgaataaggaaatgacaattttttccacttatctgatcagaacaaatgtttattaagcatcagaaactctgccaacactgaggatgtaaagatcaataaaacaaataataatcataaaaaaaaa

SEQ ID NO: 324 - protein, 200 aa, Homo sapiens
MAKGDPKKPKGKTSAYAFFVQTCREEHKKKNPEVPVNFAEFSKKCSERWKTVSGKEKSKFDEMAKADKVRYDREMKDYGPAKGGKKKKDPNAPKRPPSGFFLFCSEFRPKIKSTNPGISIGDVAKKLGEMWNNLNDSEKQPYITKAAKLKEKYEKDVADYKSKGKFDGAKGPAKVARKKVEEEDEEQEEEEEEEEEEEDE

SEQ ID NO: 325 - protein, 263 aa, Homo sapiens
MFRNQYDNDVTVWSPQGRIHQIEYAMEAVKQGSATVGLKSKTHAVLVALKRAQSELAAHQKKILHVDNHIGISIAGLTADARLLCNFMRQECLDSRFVFDRPLPVSRLVSLIGSKTQIPTQRYGRRPYGVGLLIAGYDDMGPHIFQTCPSANYFDCRAMSIGARSQSARTYLERHMSEFMECNLNELVKHGLRALRETLPAEQDLTTKNVSIGIVGKDLEFTIYDDDDVSPFLEGLEERPQRKAQPAQPADEPAEKADEPMEH

SEQ ID NO: 326 - protein, 539 aa, Homo sapiens
MPENVAPRSGATAGAAGGRGKGAYQDRDKPAQIRFSNISAAKAVADAIRTSLGPKGMDKMIQDGKGDVTITNDGATILKQMQVLHPAARMLVELSKAQDIEAGDGTTSVVIIAGSLLDSCTKLLQKGIHPTIISESFQKALEKGIEILTDMSRPVELSDRETLLNSATTSLNSKVVSQYSSLLSPMSVNAVMKVIDPATATSVDLRDIKIVKKLGGTIDDCELVEGLVLTQKVSNSGITRVEKAKIGLIQFCLSAPKTDMDNQIVVSDYAQMDRVLREERAYILNLVKQIKKTGCNVLLIQKSILRDALSDLALHFLNKMKIMVIKDIEREDIEFICKTIGTKPVAHIDQFTADMLGSAELAEEVNLNGSGKLLKITGCASPGKTVTIVVRGSNKLVIEEAERSIHDALCVIRCLVKKRALIAGGGAPEIELALRLTEYSRTLSGMESYCVRAFADAMEVIPSTLAENAGLNPISTVTELRNRHAQGEKTAGINVRKGGISNILEELVVQPLLVSVSALTLATETVRSILKIDDVVNTR

SEQ ID NO: 327 - protein, 144 aa, Homo sapiens
MAFTFAAFCYMLALLLTAALIFFAIWHIIAFDELKTDYKNPIDQCNTLNPLVLPEYLIHAFFCVMFLCAAEWLTLGLNMPLLAYHIWRYMSRPVMSGPGLYDPTTIMNADILAYCQKEGWCKLAFYLLAFFYYLYGMIYVLVSS

SEQ ID NO: 328 - protein, 138 aa, Homo sapiens
MPNFSGNWKIIRSENFEELLKVLGVNVMLRKIAVAAASKPAVEIKQEGDTFYIKTSTTVRTTEINFKVGEEFEEQTVDGRPCKSLVKWESENKMVCEQKLLKGEGPKTSWTRELTNDGELILTMTADDVVCTRVYVRE

SEQ ID NO: 329 - protein, 346 aa, Homo sapiens
MFLSILVALCLWLHLALGVRGAPCEAVRIPMCRHMPWNITRMPNHLHHSTQENAILAIEQYEELVDVNCSAVLRFFFCAMYAPICTLEFLHDPIKPCKSVCQRARDDCEPLMKMYNHSWPESLACDELPVYDRGVCISPEAIVTDLPEDVKWIDITPDMMVQERPLDVDCKRLSPDRCKCKKVKPTLATYLSKNYSYVIHAKIKAVQRSGCNEVTTVVDVKEIFKSSSPIPRTQVPLITNSSCQCPHILPHQDVLIMCYEWRSRMMLLENCLVEKWRDQLSKRSIQWEERLQEQRRTVQDKKKTAGRTSRSNPPKPKGKPPAPKPASPKKNIKTRSAQKRTNPKRV

SEQ ID NO: 330 - protein, 826 aa, Homo sapiens
MEGAGGANDKKKISSERRKEKSRDAARSRRSKESEVFYELAHQLPLPHNVSSHLDKASVMRLTISYLRVRKLLDAGDLDIEDDMKAQMNCFYLKALDGFVMVLTDDGDMIYISDNVNKYMGLTQFELTGHSVFDFTHPCDHEEMREMLTHRNGLVKKGKEQNTQRSFFLRMKCTLTSRGRTMNIKSATWKVLHCTGHIHVYDTNSNQPQCGYKKPPMTCLVLICEPIPHPSNIEIPLDSKTFLSRHSLDMKFSYCDERITELMGYEPEELLGRSIYEYYHALDSDHLTKTHHDMFTKGQVTTGQYRMLAKRGGYVWVETQATVIYNTKNSQPQCIVCVNYVVSGIIQHDLIFSLQQTECVLKPVESSDMKMTQLFTKVESEDTSSLFDKLKKEPDALTLLAPAAGDTIISLDFGSNDTETDDQQLEEVPLYNDVMLPSPNEKLQNINLAMSPLPTAETPKPLRSSADPALNQEVALKLEPNPESLELSFTMPQIQDQTPSPSDGSTRQSSPEPNSPSEYCFYVDSDMVNEFKLELVEKLFAEDTEAKNPFSTQDTDLDLEMLAPYIPMDDDFQLRSFDQLSPLESSSASPESASPQSTVTVFQQTQIQEPTANATTTTATTDELKTVTKDRMEDIKILIASPSPTHIHKETTSATSSPYRDTQSRTASPNRAGKGVIEQTEKSHPRSPNVLSVALSQRTTVPEEELNPKILALQNAQRKRKMEHDGSLFQAVGIGTLLQQPDDHAATTSLSWKRVKGCKSSEQNGMEQKTIILIPSDLACRLLGQSMDESGLPQLTSYDCEVNAPIQGSRNLLQGEELLRALDQVN

SEQ ID NO: 331 - protein, 92 aa, Homo sapiens
MAYRGQGQKVQKVMVQPINLIFRYLQNRSRIQVWLYEQVNMRIEGCIIGFDEYMNLVLDDAEEIHSKTKSRKQLGRIMLKGDNITLLQSVSN

SEQ ID NO: 332 - protein, 235 aa, Homo sapiens
MDPARPLGLSILLLFLTEAALGDAAQEPTGNNAEICLLPLDYGPCRALLLRYYYDRYTQSCRQFLYGGCEGNANNFYTWEACDDACWRIEKVPKVCRLQVSVDDQCEGSTEKYFFNLSSMTCEKFFSGGCHRNRIENRFPDEATCMGFCAPKKIPSFCYSPKDEGLCSANVTRYYFNPRYRTCDAFTYTGCGGNDNNFVSREDCKRACAKALKKKKKMPKLRFASRIRKIRKKQF

SEQ ID NO: 333 - protein, 291 aa, Homo sapiens
MQRARPTLWAAALTLLVLLRGPPVARAGASSGGLGPVVRCEPCDARALAQCAPPPAVCAELVREPGCGCCLTCALSEGQPCGIYTERCGSGLRCQPSPDEARPLQALLDGRGLCVNASAVSRLRAYLLPAPPAPGNASESEEDRSAGSVESPSVSSTHRVSDPKFHPLHSKIIIIKKGHAKDSQRYKVDYESQSTDTQNFSSESKRETEYGPCRREMEDTLNHLKFLNVLSPRGVHIPNCDKKGFYKKKQCRPSKGRKRGFCWCVDKYGQPLPGYTTKGKEDVHCYSMQSK

SEQ ID NO: 334 - protein, 582 aa, Homo sapiens
ESKGASSCRLLFCLLISATVFRPGLGWYTVNSAYGDTIIIPCRLDVPQNLMFGKWKYEKPDGSPVFIAFRSSTKKSVQYDDVPEYKDRLNLSENYTLSISNARISDEKRFVCMLVTEDNVFEAPTIVKVFKQPSKPEIVSKALFLETEQLKKLGDCISEDSYPDGNITWYRNGKVLHPLEGAVVIIFKKEMDPVTQLYTMTSTLEYKTTKADIQMPFTCSVTYYGPSGQKTIHSEQAVFDIYYPTEQVTIQVLPPKNAIKEGDNITLKCLGNGNPPPEEFLFYLPGQPEGIRSSNTYTLTDVRRNATGDYKCSLIDKKSMIASTAITVHYLDLSLNPSGEVTRQIGDALPVSCTISASRNATVVWMKDNIRLRSSPSFSSLHYQDAGNYVCETALQEVEGLKKRESLTLIVEGKPQIKMTKKTDPSGLSKTIICHVEGFPKPAIQWTITGSGSVINQTEESPYINGRYYSKIIISPEENVTLTCTAENQLERTVNSLNVSAISIPEHDEADEISDENREKVNDQAKLIVGIVVGLLLAALVAGVVYWLYMKKSKTASKHVNKDLGNMEENKKLEENNHKTEA

SEQ ID NO: 335 - protein, 709 aa, Homo sapiens
MAEVEDQAARDMKRLEEKDKERKNVKGIRDDIEEEDDQEAYFRYMAENPTAGVVQEEEEDNLEYDSDGNPIAPTKKIIDPLPPIDHSEIDYPPFEKNFYNEHEEITNLTPQQLIDLRHKLNLRVSGAAPPRPGSSFAHFGFDEQLMHQIRKSEYTQPTPIQCQGVPVALSGRDMIGIAKTGSGKTAAFIWPMLIHIMDQKELEPGDGPIAVIVCPTRELCQQIHAECKRFGKAYNLRSVAVYGGGSMWEQAKALQEGAEIVVCTPGRLIDHVKKKATNLQRVSYLVFDEADRMFDMGFEYQVRSIASHVRPDRQTLLFSATFRKKIEKLARDILIDPIRVVQGDIGEANEDVTQIVEILHSGPSKWNWLTRRLVEFTSSGSVLLFVTKKANAEELANNLKQEGHNLGLLHGDMDQSERNKVISDFKKKDIPVLVATDVAARGLDIPSIKTVINYDVARDIDTHTHRIGRTGRAGEKGVAYTLLTPKDSNFAGDLVRNLEGANQHVSKELLDLAMQNAWFRKSRFKGGKGKKLNIGGGGLGYRERPGLGSENMDRGNNNVMSNYEAYKPSTGAMGDRLTAMKAAFQSQYKSHFVAASLSNQKAGSSAAGASGWTSAGSLNSVPTNSAQQGHNSPDSPVTSAAKGIPGFGNTGNISGAPVTYPSAGAQGVNNTASGNNSREGTGGSNGKRERYTENRGSSPSQSRRDWQSA

SEQ ID NO: 336 - protein, 480 aa, Homo sapiens
MIRAAPPPLFLLLLLLLLLVSWASRGEAAPDQDEIQRLPGLAKQPSFRQYSGYLKSSGSKHLHYWFVESQKDPENSPVVLWLNGGPGCSSLDGLLTEHGPFLVQPDGVTLEYNPYSWNLIANVLYLESPAGVGFSYSDDKFYATNDTEVAQSNFEALQDFFRLFPEYKNNKLFLTGESYAGIYIPTLAVLVMQDPSMNLQGLAVGNGLSSYEQNDNSLVYFAYYHGLLGNRLWSSLQTHCCSQNKCNFYDNKDLECVTNLQEVARIVGNSGLNIYNLYAPCAGGVPSHFRYEKDTVVVQDLGNIFTRLPLKRMWHQALLRSGDKVRMDPPCTNTTAASTYLNNPYVRKALNIPEQLPQWDMCNFLVNLQYRRLYRSMNSQYLKLLSSQKYQILLYNGDVDMACNFMGDEWFVDSLNQKMEVQRRPWLVKYGDSGEQIAGFVKEFSHIAFLTIKGAGHMVPTDKPLAAFTMFSRFLNKQPY

SEQ ID NO: 337 - protein, 543 aa, Homo sapiens
MAAAKAEMQLMSPLQISDPFGSFPHSPTMDNYPKLEEMMLLSNGAPQFLGAAGAPEGSGSNSSSSSSGGGGGGGGGSNSSSSSSTFNPQADTGEQPYEHLTAESFPDISLNNEKVLVETSYPSQTTRLPPITYTGRFSLEPAPNSGNTLWPEPLFSLVSGLVSMTNPPASSSSAPSPAASSASASQSPPLSCAVPSNDSSPIYSAAPTFPTPNTDIFPEPQSQAFPGSAGTALQYPPPAYPAAKGGFQVPMIPDYLFPQQQGDLGLGTPDQKPFQGLESRTQQPSLTPLSTIKAFATQSGSQDLKALNTSYQSQLIKPSRMRKYPNRPSKTPPHERPYACPVESCDRRFSRSDELTRHIRIHTGQKPFQCRICMRNFSRSDHLTTHIRTHTGEKPFACDICGRKFARSDERKRHTKIHLRQKDKKADKSVVASSATSSLSSYPSPVATSYPSPVTTSYPSPATTSYPSPVPTSFSSPGSSTYPSPVHSGFPSPSVATTYSSVPPAFPAQVSSFPSSAVTNSFSASTGLSDMTATFSPRTIEIC

SEQ ID NO: 338 - protein, 148 aa, Homo sapiens
PPATSYAPSDVPSGVALFLTIPFAFFLPELIFGFLVWTMVAATHIVYPLLQGWVMYVSLTSFLISLMFLLSYLFGFYKRFESWRVLDSLYHGTTGILYMSAAVLQVHATIVSEKLLDPRIYYINSAASFFAFIATLLYILHAFSIYYH

SEQ ID NO: 339 - protein, 196 aa, Homo sapiens
MPGMFFSANPKELKGTTHSLLDDKMQKRRPKTFGMDMKAYLRSMIPHLESGMKSSKSKDVLSAAEVMQWSQSLEKLLANQTGQNVFGSFLKSEFSEENIEFWLACEDYKKTESDLLPCKAEEIYKAFVHSDAAKQINIDFRTRESTAKKIKAPTPTCFDEAQKVIYTLMEKDSYPRFLKSDIYLNLLNDLQANSLK

SEQ ID NO: 340 - protein, 316 aa, Homo sapiens
MATFVELSTKAKMPIVGLGTWKSPLGKVKEAVKVAIDAGYRHIDCAYVYQNEHEVGEAIQEKIQEKAVKREDLFIVSKLWPTFFERPLVRKAFEKTLKDLKLSYLDVYLIHWPQGFKSGDDLFPKDDKGNAIGGKATFLDAWEAMEELVDEGLVKALGVSNFSHFQIEKLLNKPGLKYKPVTNQVECHPYLTQEKLIQYCHSKGITVTAYSPLGSPDRPWAKPEDPSLLEDPKIKEIAAKHKKTAAQVLIRFHIQRNVIVIPKSVTPARIVENIQVFDFKLSDEEMATILSFNRNWRACNVLQSSHLEDYPFNAEY

SEQ ID NO: 341 - DNA, 422 bp, Homo sapien
  misc_feature (1)...(422): n = A,T,C or G
gatganattnttncnagagagaggaagangctattcagttggatgggattaaatgcatcacaaataagagaacttagagagaagtcggaaaagtttgccttccaagcccgaagttaacagaatgatgaaacttatcatcaattcattgtataaaaataaagagattttcctgagagaactgatttcaaatgcttctgatgctttagataagataaggctaatatcactgactgatgaaaatgctctttctggaaatgaggaactaacagtcaaaattaagtgtgataaggagaagacctgctgcatgtcacagacaccggtgtaggaatgaccagagaagagttggttaaaaaccttggtaccatagccaaatctgggacaagcgagtttttaaacaaaatgactgaagcacaggaagatgg

SEQ ID NO: 342 - DNA, 472 bp, Homo sapien
  misc_feature (1)...(472): n = A,T,C or G
ctggagaaggtgtgcaggggaaaccctgctgatgtcaccgaggccaggttgtctttctactcgggacactcttcctttgggatgtactgcatggtgttcttggcgctgnatgtgcaggcacgactctgttggaagtgggcacggctgctgcgacccacagtccagttcttcctggtggcctttgccctctacgtgggctacacccgcgtgtctgattacaaacaccactggagcgatgtccttgttggcctcctgcagggggcactggtggctgccctcactgtctgctacatctcagacttcctcaaagcccgacccccacagcactgtctgaaggaggaggagctggaacggaagcccagcctgtcactgacgttgaccctgggcgaggctgaccacaaccactatggatacccgcactcctcctcctgaggccggaccccgcccaggcagggagctactgtgagtccag

SEQ ID NO: 343 - DNA, 139 bp, Homo sapien
gtcctgggccttccccttccctcaagccagggctcctcctcctgtcgtgggctcattgtgaccactggcctctctacagcacggcctgtggcctgttcaaggcagaaccacgacccttgactcccgggtggggaggtgg

SEQ ID NO: 344 - DNA, 235 bp, Homo sapien
ctgcgggctcagcacagtagacatgactgggatccccaccttggacaacctccagaagggagtccaatttgctctcaagtaccagtcgctgggccagtgtgtttacgtgcattgtaaggctgggcgctccaggagtgccactatggtggcagcatacctgattcaggtgcacaaatggagtccagaggaggctgtaagagccatcgccaagatccggtcatacatccacatcagg

SEQ ID NO: 345 - DNA, 458 bp, Homo sapien
ctgtaaggtgctattcagtcctgtgacccttattttggaatgctcttcattactgttgctctgttttgtgacttcctgggaaaccgcctactttggtgtggtgtcaccttgagctgtgcacataggacaccagttttgacttaacctaacaggcagtttttatctctagctttttcaagccaggtattgagcagtttcttggccaatggcctgagaaaccacctgtccctgtcaaggggtgattttattggttttaagtggggaagtaatcccatgtacttatttcttaaatacctaggaagttcttcttggtggctcctcttggccctcccctctttctcccccaacccaccatcctgcaaggcaaggaatggcctctccctccacagaggcaacggctgcagagggagcactgtggctgccatcccagttcctcttcaaagccaaacagacacgcg

SEQ ID NO: 346 - DNA, 525 bp, Homo sapien
  misc_feature (1)...(525): n = A,T,C or G
ccagagcacaacgcctcaccatggactggacctggaggatnntcttnnnggtggcagcagccacaggtgtccactcccaagcccaacttgtgcagtctggggctgaggagaagaagcctggggcctcagtgactatttcttgtaaggcttctggatatatncttactaaatatactttacattgggtgcgccaggccccccccggacaaagacctgaatgggtgggatggatcaacactggcattgataccgttaaatattcacagaagtttcaggacagagtctccattacctgggactcatccgcgaccacagnctacctgnanntgagtagcctggaatccgaagacacggctgtgtattactgtgcgagacttanggcccgttcgctgtggtgggacttaatgacgcttttgacatctggggccaagggacagtggtcaccgtctcttcanggagtgcattcgccccaacccttttccccctctctcctgtgaagaattccccgncggatacgagcagcgt

SEQ ID NO: 347 - DNA, 423 bp, Homo sapien
ccagacgctgacttgtttctgagtccttaagcaggaaggatttgaaatcctggagcttggcagtcttgctcttcacctctaagccaatgttgaccccttcatctataaagtccacaactctccggaagtcatcctcacggaactgtcgagaagttaaggctggggccccaagccgcaggccgcccggtgtgatggcacttcggtctccaggacaggtgttcttgttggcagtgatggatacaagctctagcacccgctcagcccgagctccatccaggcccttgggccgcaggtccaccagcaccaggtggttgtcagtaccacctgataccagtgagtagcctcgctctagcagggcatctgccatggcccgagcattcttcagaacctgcagggagtactcccggaacatgggggtgcagg

SEQ ID NO: 348 - DNA, 513 bp, Homo sapien
cctctaggcctgatgctctcagaggcaatagaagaaaagtaaaaggaaggtctcacttcacagacaatgaaaccctcctaaccctcttccccactacccacaactccctacactgccaatctaaataaaaagaggacaatgcatgagtgtgagatacacatacacacacacacatacacacacacacacgcacagcttcctttcagccaaagaactgcaaaatccttccccggaaggaggacaactggcaacaccaatcaaggcttggtggtctaaggtgatggctggaatcatgtgagactggtaaaaatccagggagaaaatgtttcaccttcagctcattcccaagtctctatgaagcccgccccacttccacataggggaactgtggctctgggggcagcctctgcagctactcagaataggtgggaggaggggctggctttgaggctgccttagccatgaggctctttgcctaggaatagctggagatgggagctgcagggggctcag

SEQ ID NO: 349 - DNA, 231 bp, Homo sapien
ccttatttctcttgtcctttcgtacagggaggaatttgaagtagatagaaaccgacctggattactccggtctgaactcagatcacgtaggactttaatcgttgaacaaacgaacctttaatagcggctgcaccatcgggatgtcctgatccaacatcgaggtcgtaaaccctattgttgatatggactctagagtaggattgcgctgttatccctagggtaacttgttcc

SEQ ID NO: 350 - DNA, 341 bp, Homo sapien
ctgcccaagggcgttcgtaacgggaatgccgaagcgtgggaaaaagggagcggtggcggaagacggggatgagctcaggacagagccagaggccaagaagagtaagacggccgcaaagaaaaatgacaaagaggcagcaggagagggcccagccctgtatgaggaccccccagatcagaaaacctcacccagtggcaaacctgccacacccaagatctgctcttggaatgtggatgggcttcgagcctggattaagaagaaaggattagattgggtaaaggaagaagccccagatatactgtgccttcaagagaccaaatgttcagagaacaaactaccag

SEQ ID NO: 351 - DNA, 256 bp, Homo sapien
ggcgttggggacggttgtaggacgtggctctttattcgtgagttttccatttacctccgctgaacctagagcttcagacgccctatggcgtccgcctcgacccaaccggcggccttgagcgctgagcaagcaaaggtggtcctcgcggaggtgatccaggcgttctccgccccggagaatgcagtgcgcatggacgaggctcgggataacgcctgcaacgacatgggtaagatgctgcaattcgtgctgcccgtgg

SEQ ID NO: 352 - DNA, 368 bp, Homo sapien
  misc_feature (1)...(368): n = A,T,C or G
cctttcttgtaagtgaagaanaaggaatgcagcaaagaagagttcgacattggagtccttagttccatcaggatcccattcgcagcctttagcatcatgtagaagcaaactgcacctatggctgagataggtgcaatgacctacaagattttgtgttttctagctgtccaggaaaagccatcttcagtcttgctgacagtcaaagagcaagtgaaaccatttccagcctaaactacataaaagcagccgaaccaatgattaaagacctctaaggctccataatcatcattaaatatgcccaaactcattgtgactttttattttatatacaggattaaaatcaacattaaatcatcttatttacatgg

SEQ ID NO: 353 - DNA, 368 bp, Homo sapien
ctgaggggtggcagtaagcaatgaggatgggctataaagctgttaactggctaagggccatccttgggcaggcatttcagacacatctgtagagagggcagtagcatctccgataggccagctctgaaggaagcttaatgcttaatacagtcacactgcataaattagcttagaatgctctcttgggtaaaaaatattaatagtgtatatgcacttgaagagcaaaattcctcaagaaaaaaagtttaatagcaaggagtttccatcagtcccggtctttgtgaggattaccacaacaaacacttaaaaggatacaacaggtacttattaaatgctgccttgccttttacctcttccttttttttttt

SEQ ID NO: 354 - DNA, 380 bp, Homo sapien
ccatggcttctcacccagacagtctttctgggcaacttggggaagcccctgttctgctcaagtctcaccccatggaagaggtgggggaagggggccttggtttttcaggaagacaggttggagagcacgagtcactacaaagcagtaaaagtgaatggtgtctccaggggctgggtccagaacaccacggagagccccagccataaaggtgtgttccgcctctggcctgcaggaatctctttgaatctctttgattggtggctccaagagcaatgggaagtcaacagccaggaggctggactgggttccctgggaccccgaggtcccagagctgctgggcagtggttgtcggcaaagaagaaaggtccaagagggtcagg

SEQ ID NO: 355 - DNA, 347 bp, Homo sapien
ccagtggaggggtgggggtatcgatcccgccgggggctggcttggttgctggtgccctgagcccttctctgcccgcctgggtgttgccttcactgatggaggtaggcgtccagccagatgtcaccagacttcttcggggacctgacgatgtccaccagcgcggtgaggaagggcttcacttcgtagctgaggccgtgcttggcacacagcgacttgaccagcggggccacccggctgtagttgtgtctcggcatcctggggaagaggtggtgctcgatctggaagttgaggtgcccgctgaaccagttggtgaaaagtgagggctccacgttgcaggtggctgccag

SEQ ID NO: 356 - DNA, 157 bp, Homo sapien
cctggagctgctgaagactgctattgggaaagctggctacactgataaggtggtcatcggcatggacgtagcggcctccgagttcttcaggtctgggaagtatgacctggacttcaagtctcccgatgaccccagcaggtacatctcgcctgaccag

SEQ ID NO: 357 - DNA, 323 bp, Homo sapien
ccatacagggctgttgcccaggccctagaggtcactcctcgtaccctgatccagaactgtggggccagcaccatccgtctacttacctcccttcgggccaagcacacccaggagaactgtgagacctggggtgtaaatggtgagacgggtactttggtggacatgaaggaactgggcatatgggagccattggctgtgaagctgcagacttataagacagcagtggagacggcagttctgctactgcgaattgatgacatcgtttcaggccacaaaaagaaaggcgatgaccagagccggcaaggcggggctcctgatgctgg

SEQ ID NO: 358 - DNA, 555 bp, Homo sapien
aaaaggtttctaaaacatgacggaggttgagatgaagcttcttcatggagtaaaaaatgtatttaaaagaaaattgagagaaaggactacagagccccgagttaataccaatagaagggcaatgcttttagattaaaatgaaggtgacttaaacagcttaaagtttagtttaaaagttgtaggtgattaaaataatttgaaggcgatcttttaaaaagagattaaaccgaaggtgattaaaagaccttgaaatccatgacgcagggagaattgcgtcatttaaagcctagttaacgcatttactaaacgcagacgaaaatggaaagattaattgggagtggtaggatgaaacaatttggagaagatagaagtttgaagtggaaaactggaagacagaagtacgggaaggcgaagaaaagaatagagaagatagggaaattagaagataaaaacatacttttagaagaaaaaagataaatttaaacctgaaaagtaggaagcagaagaaaaaagacaagctaggaaacaaaaagctaagggcaaaatgtacaccac

SEQ ID NO: 359 - DNA, 549 bp, Homo sapien
ctgccaggctgaaaagaagcctcagctcccacaccgccctcctcaccgcccttcctcggcagtcacttccactggtggaccacgggcccccagccctgtgtcggccttgtctgtctcagctcaaccacagtctgacaccagagcccacttccatcctctctggtgtgaggcacagcgagggcagcatctggaggagctctgcagcctccacacctaccacgacctcccagggctgggctcaggaaaaaccagccactgctttacaggacagggggttgaagctgagccccgcctcacacccacccccatgcactcaaagattggattttacagctacttgcaattcaaaattcagaagaataaaaaatgggaacatacagaactctaaaagatagacatcagaaattgttaagttaagctttttcaaaaaatcagcaattccccagcgtagtcaagggtggacactgcacgctctggcatgatgggatggcgaccgggcaagctttcttcctcgagatgctcttgctgcttgagagctattgctttggt

SEQ ID NO: 360 - DNA, 289 bp, Homo sapien
tttaaattttactagtgttacttaatgtatattctaaaaagagaatgcagtaactaatgccctaaatgtttgatctctgtttgtcattactttttcaaaattatttttttctgtaaagtataatatataaaacttcttgcttaaattgaatttctatattagtggttaattgcagtttattaaagggatcattatcagtaatttcatagcaactgttctagtgttttgtgtttttaaaacagaattaggaatttgagatatctgattatatttttcatatgaatcacag

SEQ ID NO: 361 - DNA, 311 bp, Homo sapien
ctgttcagtatggcaaagggcagacttactccttcatccactctgctgccttgatgaggtgaacacactggaataagatggagggcaggatacctgccaaagcctgaggaatgagatgatctgaaacaattgggcaaaggctggacatttcaaaaagctgacttccaactgcagtttatgggtatagaatttgatgcttccctcaagtcctgactgctctttctgaggcagccaggctaggccaagaaatgagctgctccagcttctccagagcacagcagcctcccagggcctgtcagcatctgcagcag

SEQ ID NO: 362 - DNA, 496 bp, Homo sapien
  misc_feature (1)...(496): n = A,T,C or G
ccagtttctaaaanaatgcacatttaaagagaagcatctaccacggctttaaaacaaaacaactctgagatgaacaatatgtgttatactcagagattaacaatctcaatcatacatactgattctttcagacatttaataaccactacatttttttgcattaatgaagtttgactatatgtgtaaagggactaaatatttttgcaacagcctgttctttgttcattcttttctggatagcgtgtcctctgtattgcggtagatttatacattctgttgcctaaatatgtgtgtaaaatgagctgataaactggagtactacttaaaaaaaagtctgtgatttataagatgcatatgctttctatgtgaatataagcttgtgcacaatgtttaaaagaaaaacaatgaattagaagagatcccccgtcccccagtctgacatatttcatacagaatgtttaaaagaaaaactctgctagtcttggcaaacatttgg

SEQ ID NO: 363 - DNA, 673 bp, Homo sapien
  misc_feature (1)...(673): n = A,T,C or G
ccaagagggagataanacaaacttctcaaacaaaaagaaaagaaaaacgaatgattcatctgctttaatcagtgtgattaatgcagcacccattgccccgggaaccgtttctgctgtactatctggatactaaaatgttacggaagtagctctttgttctccctcactctgcccttagttaatagaaattcagactcgccaagtaaggctttgtgcatagtgtcttcatgtcgcgtatagttgagcgcgttcttagcagttggcttcatggacagctcattagtgttttgacttttcttacccagcgttaattgaattcttgcttttagacaacttcctttttgtagtggtgaaccttgccctttagtacagttcaagtgaatctggataattgttcatctttgctttagcttagataccatgtagtggtctgtggctacaggaagctggttctgtctgcttccacagtctgcttaaaaaactgtctgacttcgtgaatatagagaccaagtttaccacttctgatgaagagaccaattaagattcattcctcattctgtttctttccagtgggagaagagtccccatgaaataagatgaaactgattccatgcactagtacatgtaggcttctcccttgcgcaaagcttaacaatttgtaggaaactttggg

SEQ ID NO: 364 - DNA, 495 bp, Homo sapien
  misc_feature (1)...(495): n = A,T,C or G
ccaaatgtttgcncaagactagcagagtttttcttttaaacattctgtatgaaatatgtcagactgggggacgggggatctcttctaattcattgtttttcttttaaacattgtgcacaagcttatattcacatagaaagcatatacatcttataaatcacagacttttttttaagtagtactccagtttatcagctcattttacacacatatttaggcaacagaatgtataaatctaccgcaatacagaggacacactatccagaaaagaatgaacaaagaacaggctgttgcaaaaatatttagtccctttacacatatagtcaaacttcattaatgcaaaaaatgtagtggttattaaatgtctgaaagaatcagtatgtatgattgagattgttaatctctgagtataacacatattgttcatctcagagttgttttgttttaaagccgtggtagatgcttctctttaaatgtgcattttttagaaactgg

SEQ ID NO: 365 - DNA, 291 bp, Homo sapien
aactgacaagcccttgcgcctgcctctccaggatgtctacaaaattggtggtattggtactgttcctgttggcccgagtggagactggtgttctcaaacccggtatggtggtcacctttgctccagtcaacgttacaacggaagtaaaatctgtcgaaatgcaccatgaagctttgagtgaagctcttcctggggacaatgtgggcttcaatgtcaagaatgtgtctgtcaaggatgttcgtcgtggcaacgttgctggtgacagcaaaaatgacccaccaatggaagcag

SEQ ID NO: 366 - DNA, 277 bp, Homo sapien
ctggatggtgcctcagaaggtgcattctgcttctgcaggggcttgaaacaccaaggcactccagggatcctggagtcaaagcagcagccccggttgttgcactccttgggggtgacatgggggtagcccgcagtccaccctgtccttggctggcacggcacactggtttgcagacaggcccacgtactcctcagcagagctggaggacaagcaaggccaggaccagccccagcatgcagagcgctctggcagccatgaccaccgtgggctccgggac

SEQ ID NO: 367 - DNA, 311 bp, Homo sapien
ccagagctgcggggcctcagtacacggagctgttccggatgccacagcacagcaccatgctcaggatcatctcgaagatcatgatcacagcgaccacgatggcagcaatgccgatgaggtacagcttcccggagaagaggtcatcgatcttctggtggcagtcctccttgaagaggttgctgatgatgttgctgcccgagggacacaaattgttcttgagcactgaggtggtcaaagcagtcagtgtgctggagccacagcagtcaagcgtctcgtggaaggtcttcaccacagccttggcgttgttggcg

SEQ ID NO: 368 - DNA, 384 bp, Homo sapien
ccaaaggggtctctagctgctgctctgctgctcctgctcatggatgagtttggcgatggggccggtgatgccgcctatcaaggtccagtactcatcgaagctgatgcgcccatcaggattggcatccaggttctggatgagcttatccgcagccttccggttccctgtgtccgacagcatgtggttcagctctttctggagcatctcgcggaagctgctcttgctgatcttgttcttgaccaggctgtacctagacacatatttgtagaagttttccaccaggacaatgactgccttctccagctccgtgtagcaagtctgacatctccctgcttcgcctgctggcggggcctaaggcgggggccaagcccagttacagcccag

SEQ ID NO: 369 - DNA, 216 bp, Homo sapien
ccaagtgccaggtggctttcagcagcttcctacgatcagccgaagaaagcagaagctctggaggctgccatcgagaacctcaatgaagccaagaactattttgcaaaggttgactgcaaagagcgcatcagggacgtcgtttacttccaggccagactctaccataccctggggaagacccaggagaggaaccggtgtgcgatgctcttccggcag

SEQ ID NO: 370 - DNA, 561 bp, Homo sapien
ctggctccttcttttgtggtcgtttgggggatgggctggtttggggtttaggtgcagagaatggtttggggccactgcgtactggaccactctgagccttcagggcagggttcttgtgagtcttcatgtcatcagatacatgtttcagggcatgtgtaatgctctccccctgattaatctgcgcgaacagtgctgagcgggaagcagactcatctgagcctgaactggtagagactgggggaggaggggggcctggtggagggggaggaggacctgatccggcagagggtccagatggcagtccgctcagttcttttgccacaggccccgttttgctccaggccagtccggtggtatggaactccttaatgtaagcctgcagctctgtccatatacttaaataagctttgacccagtctacatgcttcttatccacatctttgtactctttgaggactcggtttgtataaaacatggcggcatcattcatttctttcgcataagggccaggcttgggagccatagccacccagcccagggcctggatactttcgctgacag

SEQ ID NO: 371 - DNA, 518 bp, Homo sapien
cccacttccatcgctctctggtgtgaggcacagcgagggcagcatctggaggagctctgcagcctccacacctaccacgacctcccagggctgggctcaggaaaaaccagccactgctttacaggacagggggttgaagctgagccccgcctcacacccacccccatgcactcaaagattggattttacagctacttgcaattcaaaattcagaagaataaaaaatgggaacatacagaactctaaaagatagacatcagaaattgttaagttaagctttttcaaaaaatcagcaattccccagcgtagtcaagggtggacactgcacgctctggcatgatgggatggcgaccgggcaagctttcttcctcgagatgctctgctgcttgagagctattgctttgttaagatataaaaaggggtttctttttgtctttctgtaaggtggacttccagcttttgattgaaagtcctagggtgattctatttctgctgtgatttatctgctgaaagctcag

SEQ ID NO: 372 - DNA, 335 bp, Homo sapien
ctggaggctgggtgcaccctgcccagatccacacctgtaccccggcggaaaggctcatgggcattgaagacggtggtgaaaaagccaaagggaaaagcaccaacaccaaatgagaagtggaagcccccggtatcaccaaatggctggaatccccctctgctctccggagctggtctctggccctgggggcggggtggagtttttaatctgggatcctggggcttctggctccctcgcccataaagcgggacaaccttctctctgctgatcccagctttacatactggacactcttgccgttctggccgtgtctccagccactgatgaagacatgg

SEQ ID NO: 373 - DNA, 467 bp, Homo sapien
ccactagctgaatcttgacatggaaggttttagctaatgccaagtggagatgcagaaaatgctaagttgacttaggggctgtgcacaggaactaaaaggcaggaaagtactaaatattgctgagagcatccaccccaggaaggactttaccttccaggagctccaaactggcaccacccccagtgctcacatggctgactttatcctccgtgttccatttggcacagcaagtggcagtgtctccaccacctatgatggtgatgcagcccctagaagtggctttcaccacctcatccatgagagctttggttccccgggcaaaagcttcccattcaaatacccccacaggaccattccacacaatctgcttagcccgagtgacagcctcagcatacttcttgctgctttcaggaccacagtccaagcccatccagccagcaggtacgccagaagccacagtggcttgg

SEQ ID NO: 374 - DNA, 284 bp, Homo sapien
tttccgtaaaagcgtgtaacaagggtgtaaatatttataattttttatacctgttgtgagacccgaggggcggcggcgcggttttttatggtgacacaaatgtatattttgctaacagcaattccaggctcagtattgtgaccgcggagccacaggggaccccacgcacattccgttgccttacccgatggcttgtgacgcggagagaaccgattaaaaccgtttgagaaactcctcccttgtctagccctgtgttcgctgtggacgctgtagaggcaggttgg

SEQ ID NO: 375 - DNA, 307 bp, Homo sapien
cctactcttctccgtccattgtactatctgcccgtggtggggatggcagtaggatcatatttgatgacttccgagaagcatattattggctccgtcataatactccagaggatgcgaaggtcatgtcctggtgggattatggctatcagattacagctatggcaaaccgaacaattttagtggacaataacacatggaataatacccatatttctcgagtagggcaggcaatggcgtccacagaggaaaaagcctatgagatcatgagggagctcgatgtcagctatgtgctggtcatttttggagg

SEQ ID NO: 376 - DNA, 650 bp, Homo sapien
  misc_feature (1)...(650): n = A,T,C or G
ccattgnctnctnacgtgatgtcatcatctgccaggtcatcttggcaaaagtcggagcatttctcagtcactgcaaagtagcccttctcgttggagcaccggaagagacgtgtgtgtttcatgtactcggcatcgtcatcatagggcttctgtgccccaatgcccacccagaagaagttctcaggctcctcaccttcgttgataacctgcttgctgtaggaggtgtcaaacatggtgttcaggatgtcttctgccaacttggcttcgtcagggtctgatgcccggcccacccaggcatacacgatgccctggttgtcctcactctcaaagggaaccttgaggatgaagcagaactcggagttgaggaggctggagtcggtgttgatctggatgcaccgggtgcagagggcgctgccgttggtgcggatctggtagaggctgggctgttgggcgccctggaccgccttcctcttgccccggtggatgatgaacttcctcttgaaatgggacaggaacttggggttctcctgctgctgcgtcatgcgtaccacctccagcttcccagggaagaggctctcgaacttcttttgcaggctgaaggtgaaggtgacccacccatattgggaggctttcacggccctgccagaagt

SEQ ID NO: 377 - DNA, 306 bp, Homo sapien
  misc_feature (1)...(306): n = A,T,C or G
tctagatgcatgctcgagcggccgccagtgtgatgganatctgcagaattcgcccttcgagcggccgcccgggcaggttcgggtgctgccttcacctgccaggcccttccccgctagcttggggcgagcagagctgcgtccagtggaactaaagccgttccaggattatcaaaaactgagcagcaaccttgggggacctggatcatcacggactcccccaactggaaggtccttctctggcctcaattcccgtctcaaggccacgccttccacctacagtggagtcttccgcacccagcgcgtcga

SEQ ID NO: 378 - DNA, 199 bp, Homo sapien
  misc_feature (1)...(199): n = A,T,C or G
ccacangtggcacttgggtgtggctcctctgttatttgtcctcatgtgagaaagcagatcatctccaaatcttgccatttgtatacttttggtggagacttggatgtcatatcttctttgttttgggttttcttccctagcttattttgtggcttttaaagaagtggattgtattgtgagatcctgtgattcctggtgg

SEQ ID NO: 379 - DNA, 216 bp, Homo sapien
  misc_feature (1)...(216): n = A,T,C or G
ccagggcangtcatcaagaggggcattgtcttgcatgcggcctgccgtgtccaccagcaccacgtcaaagccttggttacgtgcaaaagcaatggcttccatggcaatgccagcagcatccttgccatagcccttttcaaacaactgcaccatggtgcggccaccatgcttctctggagggtgtagggcactcaaacgccgggtgtgtgtacgcag

SEQ ID NO: 380 - DNA, 555 bp, Homo sapien
ccatgggccttcctttccactaaaaggaattccgaacagcaaaaagaaggtcttgagatagtgaaaatggtgatgatatctttagaaggtgaagatgggttggatgaaatttattcattcagtgagagtctgagaaaactgtgcgtcttcaagaaaattgagaggcattccattcactggccctgccgactgaccattggctccaatttgtctataaggattgcagcctataaatcgattctacaggagagagttaaaaagacttggacagttgtggatgcaaaaaccctaaaaaaagaagatatacaaaaagaaacagtttattgcttaaatgatgatgatgaaactgaagttttaaaagaggatattattcaagggttccgctatggaagtgatatagttcctttctctaaagtggatgaggaacaaatgaaatataaatcggaggggaagtgcttctctgttttgggattttgtaaatcttctcagggtcagagaagattcttcatgggaaatcaagttctaaaggctttgccccaagagatgatgaggcag

SEQ ID NO: 381 - DNA, 406 bp, Homo sapien
ctgcaccaggtgggcctctaggtcccattaagcccattggtccagggccaagtccaactccttttccatcatactgagcagcaaagttcccaccgagaccaggggggccaggaggaccaggtggaccaggagggcctgtgggaccatcttcaccatctctgcctggggggcctggtggacccctttctccacgtggtcctctatctccggctgggccctttcttacagtttcctcttgtaaagattggcatgttgctaggcataaggttactgcaagcagcaacaaagtccgcgtatccacaaagctgagcatgtctagcacttagacatgcagactccttgtgtcgcagagcccctgggtcaccggcggaggtatcacctggcgggcgcgggcatgcagtcgtgg

SEQ ID NO: 382 - DNA, 528 bp, Homo sapien
  misc_feature (1)...(528): n = A,T,C or G
ctgagcagtttgtgggtntntcttcccgcaagtttcaggaagtattcacaaaagaaaaatacattttttcccccaggggtggggcaaggacagtggagagagtgctaggaaatgagtcccctgggaaaggggaccgggccgtgatgttaaatatctccggctcccaagtgactggatttgcctaggaccttcagaccaacagacttcagaccctcagacctgccccggggccaggtggagaaagtgagggccgtacaaggaagtgaaattctgagttgttggggctaagcctgaccccctctccatgctccccgccccaacccactctggcctcagtagatttttttttcagttgtggttgttgcccaggctggagtgcagtagcgccatcttggctcactgcacctccaccttccgggctcaagcgattctccagcctcagcctcctgagtagctaggactgcaggtgctccaccacgcccggctaatttttgtatttttagtagagatggggtttccccatgttgg

SEQ ID NO: 383 - DNA, 335 bp, Homo sapien
  misc_feature (1)...(335): n = A,T,C or G
ccatnttgagtctactcctgcgtcttgtgccctagcaccccgagaaccgtcagtttgagccagatggaagctgagctgaacacattacgatggatgatggaaacataagactatcaagaaatccaagtggtaatgggcgaagtttattcagcatccggcaatggacttatcgtagttggggaaacgggtgttccgaataatatcctggaagttatcaggacacctattttaaatataggcctgaattttgtaaagtaatatttaaggtggtccgtgataattaaataaaatgcttaattcatgtggcgaaaaaaaaaaaanaaaaaaaaaaaaaa

SEQ ID NO: 384 - DNA, 333 bp, Homo sapien
agtccaatacggctattggggttgtagcagctttcagaggaaattagtggtctgggcttgcctccagctccccaggggcagccccagtagctacactgtccagacagcacaagaccaggctggtgtcacgtccatccgagcgctgcctcagggatcgataaagtttcactgcagaaagtctccactgcggtatgctgacatctgccctgaaccttcaccctacagcattacaggctttaatcagattctgctggaaagacacaggctgatccacgtgacctcttctgccttcactgggctggggtgatccttggtgcctttgtttccacaagg

SEQ ID NO: 385 - DNA, 343 bp, Homo sapien
ctgtgacacctcaggttgaaagggtcttcctccttgaacacccaccgaggggcctggagcaacagccagccgatatggacttctagctgcaccgggtcactgagggtggagaggtttgtctggcacctgtactctccactgtcgtcgactgtggcagcgtcaatgaagtagctcgaggcctggcttgagatgaggctctcattgtgaaaccactgtgtggaattgtcctcaggggagtaggctccctggcacttcagagtcacactgtccttctcgagcaccctgtaccattgaggctccaggaacaccacagcctttgggagatcttcagtccgcatgccaa

SEQ ID NO: 386 - DNA, 244 bp, Homo sapien
tattctttgattcttggcaaataggtgagagaactaatagcaaccaggcaactgaggacgaagtcaaaaagtcggtaacagaagaatggaatcagccaacccacttgataagaaattgctccataaaccagcattgaactgattataaacataagaacagagacggcaaaaagaacacaggcattatcagccattctctcagacgaatagtaattaccgatgacttcatactgaatgttgacag

SEQ ID NO: 387 - DNA, 504 bp, Homo sapien
atctggagtccagcctcagggatgcgctactttccattctctgcattgaacattcgttctgtcagcatccgctccagcttcactgcatcagcggcaaacttgcggatcccgtcagagagcttctccacagccatctggtcctcgttgtgcaaccaacggaaagacttctcatccaggtggattttttccaggtcactggcttgggccgccttggctgagagcacaggcaccagcttggcgttgtcctgcagcagctctcccaggagcttgggtgggatggtgaggaagtcacagccggccagtgctttgatctcgcccgtgttgcggaaggaggcgcccatgacaatggttttgtagctaaacttcttgtagtagttgtagattttagtgacactctttaccccagggtcttccaggggctcataggatttcttgtcggtgtttgccacatgccaatcaaggatgcgcccaacaaatggggagatgagggtcacacccgcctcg

SEQ ID NO: 388 - DNA, 450 bp, Homo sapien
  misc_feature (1)...(450): n = A,T,C or G
gccaaagtgctgcntgaattccactcccttggttttcgcctgcccagcgttgctgtttgcgtggagggtggggggagctcagtggcagggaatcagcggtccgtggggtcgtggggacgggaacatgtgcccgaccgctccatcccctcctcctccttaggatgcataacctaccttgtctttttttttttaaattttntttccaggtanagtagctntttgtacataaanaatacttgaaaaattaattgtatgatgtatgaaaanacanagtctcctagttttgtatnttgttgtatgactgccatgagttccaccaaaaagccactntattttggtctntgtgacattttaaatgcgtgacaaaagtgagcaaataaagngaggaanaaatntatntatganataatatanattgtattgaaatctaaaaaaaaaaaaaaaaaaaaa

SEQ ID NO: 389 - DNA, 297 bp, Homo sapien
cctgcacttgaacatggctttggttttaagcaacttctctaccctgaccctcctcctgggacagcgtttcgggaggtttcttggcctcactgagagggatgtggagctgctgtaccccgtcaaggagaaggtattctacagcctgatgagggagagcggctacatgcacatccagtgcaccaagcctgacaccgtaggctctgctctgaatgactctcctgtgggtctggctgcctatattctagagaagttttccacctggaccaatacggaattccgatacctggaggatggagg

SEQ ID NO: 390 - DNA, 223 bp, Homo sapien
ctgggctggagagttggtgctggcaaaacagtccttcccctggggccggttcttacccaggtccagagaaaccaacgcgggatgtcagacttcaccaaaaggactttctggttgcccctggctggcttcctggaggcgttcgcctctagtttctcagggatggagcgagagcccagccagagaacagtaagaggagctgctctcctatctgcactcacccagg

SEQ ID NO: 391 - DNA, 365 bp, Homo sapien
ctgaggaagaaatgaaaaaagaccctgtccctcatggcccgcccactggcctcctgtgaactctgtcctgttgccaaccccagatgaagtcagccaaaaagtgctttccacatcctctctctggggctgcccagcctgaccgtaggggatccactggcagagccaaggtggatgctggtgcctgaagctggaagccagcaggacatgagacccctcctgtagcaggaagtggttctagaactcccagcagaacagaacggaaaaggagctgattggggatagaatgagttctgctaaacagccagatgctctgagagaggtgacactggactgtctcggaggtgtgtgcagatggctacaggtgg

SEQ ID NO: 392 - DNA, 302 bp, Homo sapien
  misc_feature (1)...(302): n = A,T,C or G
ccaagagctacaatgagcagcgcatcangacagaacgtgcaggtttttgagttccagttgactgcagaggacatgaaagccatagatggcctagacagaaatctccactattttaacagtgatagttttgctagccaccctaattatccatattcagatgaatattaacatggagagctttgcctgatgtctaccagaagccctgtgtgtggatggtgacgcagaggacgtctctatgccggtgactggacatatcacctctacttaaatccgtcctgtttagcgacttcagtcaactacag

SEQ ID NO: 393 - DNA, 213 bp, Homo sapien
  misc_feature (1)...(213): n = A,T,C or G
ccaataatcaagnacaaanactggatttgaggatggatcagttctgaaacagtttctttctgaaacagagaaaatgtcccctgaagacagagcaaaatgctttggaaagaatgaggccatacaggcagcccatgatgccgtggcacaggaaggccaatgtcgggtagatgacaaggtgaatttccattttattctgtttaacaacgtggatgg

SEQ ID NO: 394 - DNA, 334 bp, Homo sapien
cctacccataatccagagaggcttgcccagaggaggactacgtgggggacgtgccaccagaaccctacttgggggcgggatgtcactccgaggtcaaaacctgctccgaggtggacgagccgtagctccccgaatgggcttaagaagaggtggtgttcgaggtcgtggaggtcctgggagagggggcctagggcgtggagctatgggtcgtggcggaatcggtggtagaggtcggggtatgataggtcggggaagagggggctttggaggccgaggccgaggccgtggacgagggagaggtgcccttgctcgccctgtattgaccaaggagcag

SEQ ID NO: 395 - DNA, 174 bp, Homo sapien
ccagatgaggaaaaaaattaggaaggagatgaagttttccaaatttcatggtatatgctgcacttccccaaccttcactctccatgtagcctactgggtctactattccacaaagtggctcaacctccaaatgacctctggtttacccctattaaaatcccaaaggactttcag

SEQ ID NO: 396 - DNA, 140 bp, Homo sapien
  misc_feature (1)...(140): n = A,T,C or G
ctgcaaagccttgtgtaacnttctccagcatttggacccagtacgtgaaagcccacaacacgttcattgtctttagtattacagattatttttgcataacatttgttgttatctcttgacggaatcgtccattccaatgg

SEQ ID NO: 397 - DNA, 318 bp, Homo sapien
cctcgcctggagggcccccgggcagcacagggaggacgagcttgtccagcagagggtctggcagagggtcccgcagaggtttgggcagggggtctgacatccctggctcctgctctggctctggctgccgggatttgcacaggcccaggtgcatacagatgccgtttgagtcagtctggttctggaagtagtcgatgaccagggggaagtagtcgtcaagcacttggttgcactggggcatgagcagcttcaaggggaggacgttgcactcctgctccaggaacttcctcatcgtgtcctggaaaatggcctccttgg

SEQ ID NO: 398 - DNA, 517 bp, Homo sapien
  misc_feature (1)...(517): n = A,T,C or G
ccttncttcgccatccattcatcgaccctctccagcacttgctgcaggcttggctgaccatccaccatggcttgaataatcccggtgagctctgtacagaatggggtaagctgtggatggactacaggctggacatacatgtgaaaggtagactcaatctccatggtccggccatttagctttaggatggggaactcgatgatttcctgaggatgaatctgtggcttgtcgcacgtggcctcaaagtccagcactaaaaagtagtgatacctctggagagggaaggacaccattgccgccatggatgcgccaaagccgtgggccgccagctttctggtggatatggagcagaactccggaacaccacagggagaaaataagtgggagcccagcacttttcttgctcttgaaagtaaatacgaagaaaatcgagctgctccagtctgtaaaggtgctagcattgaacatccagaagcatctaaaactctccttacttcgaagatgccaagaccggcag

SEQ ID NO: 399 - DNA, 329 bp, Homo sapien
ccaacctcaggcaacgggtggagcagtttgccagggccttccccatgcctggttttgatgagcattgaaggcacctgggaaatgaggcccacagactcaaagttactctccttccccctacctgggccagtgaaatagaaagcctttctattttttggtgcgggagggaagacctctcacttagggcaagagccaggtatagtctcccttcccagaatttgtaactgagaagatcttttctttttccttttttcggtaacaagacttagaaggagggcccaggcactttctgtttgaacccctgtcatgatcacagtgtcagagacgcg

SEQ ID NO: 400 - DNA, 451 bp, Homo sapien
ctggcttcactgctcaggtgattatcctgaaccatccaggccaaataagcgccggctatgcccctgtattggattgccacacggctcacattgcatgcaagtttgctgagctgaaggaaaagattgatcgccgttctggtaaaaagctggaagatggccctaaattcttgaagtctggtgatgctgccattgttgatatggttcctggcaagcccatgtgtgttgagagcttctcagactatccacctttgggtcgctttgctgttcgtgatatgagacagacagttgcggtgggtgtcatcaaagcagtggacaagaagctgctggagctggcaaggtcaccaagtctgcccagaaagctcagaagctaaatgaatattatccctaatacctgccaccccactcttaatcagtggtggaagaacggctcagaactgtttgtttcaattgg

SEQ ID NO: 401 - DNA, 180 bp, Homo sapien
ccaggaagcaggccaggggattggcagcactgcccagcaccacagccaggtggtaggccagacgcccgtagggtaagcaggaaaagctctgcacggcaggcagcacgccattggtcagcgcgttggtggcggccaacaggcccagcaggcaggcactgcgggctgatagaagctgatagg

SEQ ID NO: 402 - DNA, 385 bp, Homo sapien
ccaggccacctgtgcggggctcctcgatgtggaaggttcgggtgaggagattgtagaaggagccgtagcacacggccaccacagtgcacgtgaggcagatcacgttgtagggcatgctgaagtccggtgtcggcaggttcaccagcagcggctccgtgtagagccgcacaaagtagttagagccatcagagactgggaacaggctgttgaagaggggactctcttcccagtccactggcttggctgctaccatgctgggcacaagggcgctgaggacagatgggctgacatagaagccatggttaggatctggcgtgtactcggtccacttcagcagcgcccgctcaaactggatggaaaccttggtgactgagttggccggcag

SEQ ID NO: 403 - DNA, 440 bp, Homo sapien
  misc_feature (1)...(440): n = A,T,C or G
ctgtttaaccagnaacccggggggtcaccccccacagaatgtacatgaaacactagaggactgcatgtttttccctgagagaagcgtaagacaaacagaagtcaaaaagtagtcactgggagcgccatccttctaagcaaatcctccctttcccttttggaggatttgcccgaactacgtagccagtcagcacttagaccacctgcctcctcccccccctataaacccaccactcccctcctcctttcccaaaccacttggggtgtcctaagccctcactgccccaagcccaaaatatcagctaagatccttgtcagtatttccacagtcatacctaatgaattgggaagtggggcccctaaaaaccaattcacatctatgcacttgtttccactggatttggcagacaggcttttttagttaccgtaaccagatcttaa

SEQ ID NO: 404 - DNA, 239 bp, Homo sapien
cctacgaaaaactcccggccggtgaagagaacgtcagtgccatccagcgtcgcgttctcgtctcctatttccacaattcggagccccaggtcttgcagggctttgcggactccatcgacctctggcctacgagcggggctccagggccgcgtgattagggccgtgtccccttggatcacggccgtgtcgccaagcagcggtcccagcggcaatgactcctcaggtggcagttctagcag

SEQ ID NO: 405 - DNA, 261 bp, Homo sapien
ctggagaggcagcccttcaccggatgcccagctccgtgcccctgcgggccccagcacagtttaccttctccccccacggcggtcccatctactctgtgagctgttcccccttccacaggaatctcttcctgagcgctgggactgacgggcatgtccacctgtactccatgctgcaggcccctcccttgacttcgctgcagctctccctcaagtatctgtttgctgtgcgctggtccccagtgcggcccttggtttttgcag

SEQ ID NO: 406 - DNA, 641 bp, Homo sapien
  misc_feature (1)...(641): n = A,T,C or G
ctgctcccgggcntggtggcagcaagtagacatcgggcctgtgcagggccacccccttgggccgggagatggtctgcttcagtggcgagggcaggtctgtgtgggtcacggtgcacgtgaacctctccccggaattccagtcatcctcgcagatgctggcctcacccacggcgctgaaagtggcattggggtggctctcggagatgttggtgtgggttttcacagcttcgccattctggcgggtccaggagatggtcacgctgtcataggtggtcaggtctgtgaccaggcaggtcaacttggtggacttggtgaggaagatgctggcaaaggatggggggatggcgaagacccggatggctgtgtcttgatcggggacacacatggaggacgcattctgctggaaggtcaggcccctgtgatccacgcggcaggtgaacatgctctggctgagccagtcgctctctttgatggtcagtgtgctggtcaccttgtaggtcgtgggcccagactctttggcctcagcctgcacctggtccgtggtgacgccagaccccacctgcttcccctcgcgcagccaggacacctgaatctgccggggactgaaacccgtggcctggcagatgagcttggacttgcgg

SEQ ID NO: 407 - DNA, 173 bp, Homo sapien
ccaggtactggcacaatcatgtctggatgggggtggtggtgtcctgtaggcagagaaacaggaaattgtcgtagtcagtatcgagcagcgtggcctcgttcgccaccgtatagttgatcttgaacttctttggattctcagtcttctctccaaggaccttcttctcaacacag

SEQ ID NO: 408 - DNA, 165 bp, Homo sapien
ccactgtctgcagccatggcagaaagtgctcaaagtccagcaccttcacattcatctcatcactcttggggttccccaggaccttgagcacctcggcgttggtagggttctggcccagggccctcatcacatccccacactggctgtacaggatcttgccatcac

SEQ ID NO: 409 - DNA, 329 bp, Homo sapien
ctgtagcttctgtgggacttccactgctcaggcgtcaggctcagatagctgctggccgcgtacttgttgttgctttgtttggagggtgtggtggtctccactcccgccttgacggggctgctatctgccttccaggccactgtcacggctcccgggtagaagtcacctatgagacacaccagtgtggccttgttggcttgaagctcctcagaggagggcgggaacagagtgaccgagggggcagccttgggctgaccaaggacggtcagcttggtccctccgccaaataccgccggataagcaccactgttgtctgctgattgacagaa

SEQ ID NO: 410 - DNA, 235 bp, Homo sapien
  misc_feature (1)...(235): n = A,T,C or G
ccatcagngagaaaggtgtttgtcagttgtttcacaaaccagattgaggaggacaaactgctctgccaatttctggatttctttattttcagcaaacactttctttaaagcttgactgtgtgggcactcatccaagtgatgaataatcatcaagggtttgttgcttgtcttggatttatatagagctttttcatatgtctgagtccagatgagttggtcaccccaacctctggag

SEQ ID NO: 411 - DNA, 294 bp, Homo sapien
aattaagggaagatgaagatgataaaacagttttggatcttgctgtggttttgtttgaaacagcaacgcttcggtcagggtatcttttaccagacactaaagcatatggagatagaatagaaagaatgcttcgcctcagtttgaacattgaccctgatgcaaaggtggaagaagagcctgaagaagaacctgaagagacagcagaagacacaacagaagacacagagcaagacgaagatgaagaaatggatgtgggaacagatgaagaagaagaaacagcaaaggaatctacag

SEQ ID NO: 412 - DNA, 433 bp, Homo sapien
  misc_feature (1)...(433): n = A,T,C or G
cctgagaagccagaggcaggtggagagggggtggaaagtgagcagcgggctgggctggagccgcacacgctctcctcccatgttaaatagcacctttagaaaaattcacaagtccccatccacaaaaaaaaaaanaanaaaaatttcagggantaaaaatanactttgaacaaaaaggaacatttgntggcctgggggggcatctnantttntntagcnccagngattccctccccnccccacccatcacatanatgtaacacctttggtntaaaatggggagccgtttccaccntgcccccntccccgcccccaggcagttgccccggngacacntcaagacaggancgaggtagtntttcancancacagttncacaaggaacagaacagtntctcccgcccagccctgcggcacaagggattgacacgcn

SEQ ID NO: 413 - DNA, 494 bp, Homo sapien
  misc_feature (1)...(494): n = A,T,C or G
ccttatttctcttgtcncttcgtacagggaggaatttgaagtagatagaaaccgacctggattactccggtctgaactcagatcacgtaggactttaatcgttgaacaaacgaacctttaatagcggctgcaccatcgggatgtcctgatccaacatcgaggtcgtaaaccctattgttgatatggactctagaataggattgcgctgttatccctagggtaacttgttccgttggtcaagttattggatcaattgagtatagtagttcgctttgactggtgaagtcttagcatgtactgctcggaggttgggttctgctccgaggtcgccccaaccgaaatttttaatgcaggtttggtagtttaggacctgtgggtttgttaggtactgtttgcattaataaattaaagctccatagggtcttctcgtcttgctgtgttatgcccgcctcttcacgggcaggtcaatttcactggttaaaagtaagagacag

SEQ ID NO: 414 - DNA, 294 bp, Homo sapien
ctgggcggatagcaccgggcatattttggaatggatgaggtctggcaccctgagcagtccagcgaggacttggtcttagttgagcaatttggctaggaggatagtatgcagcacggttctgagtctgtgggatagctgccatgaagtaacctgaaggaggtgctggctggtaggggttgattacagggttgggaacagctcgtacacctgccattctctgcatatactggttagtgaggtgagcctggcgctcttctttgcgctgagctaaagctacatacaatggccttgtgg

SEQ ID NO: 415 - DNA, 421 bp, Homo sapien
ccttgcccctgccctcccacgaatggttaatatatatgtagatatatattttagcagtgacattcccagagagccccagagctctcaagctcctttctgtcagggtggggggttcagcctgtcctgtcacctctgaggtgcctgctggcatcctctcccccatgcttactaatacattcccttccccatagccatcaaaactggaccaactggcctcttcctttcccctgggaccaaaatttaggggcctcagtccctcaccgccatgccctggcctattctgtctctccttcttccccctggcctgttctgtctctgagctctgtgtcctccgttcattccatggctgggagtcactgatgctgcctctgccttctgatgctggactggccttgcttctacaagtatgcttctcccacag

SEQ ID NO: 416 - DNA, 342 bp, Homo sapien
  misc_feature (1)...(342): n = A,T,C or G
ccactttctttcccacnctggaaggcggcatctatgacttcattggggagttcatgaaggccagcgtggatgtggcagacctgataggtctaaaccttgtcatgtcccggaatgccggcaagggagagtacaagatcatggttgctgccctgggctgggccactgctgagcttattatgtcccgctgcactcccctatgggtcggagcccggggcattgagtttgactggaagtacatccagatgagcatagactccaacatcagtctggtccattacatcgtcgcgtctgctcaggtctggatgataacacgctatgatctgtaccacaccttccggccgg

SEQ ID NO: 417 - DNA, 389 bp, Homo sapien
tattaattaggttcttaagacatttagaacaccaatttgtgaggataaattccattcgtcagagcaaacacagatcgcaggtagccctggagctgaggaatagctttgatttttggtaaaatttgtgagtccacagctttctgatcaatcttgcgctgctccgtaatctcatatttctctttttctgtgtcgaagatctcaccttcctggtgtctgggcttccgcagcttcttcttcttgaagtaagcatcagtaagatgttttgggatttttacattgctgatatcgattttggttgaagtggcaatgacaaatttctggtgtgttcttcgtagaggaactcgattgaggaccagaggtccagtcacaagtaataagccactagccag

SEQ ID NO: 418 - DNA, 343 bp, Homo sapien
gtgggagggagccaggttgggatggagggagtttacaggaagcagacagggccaacgtcgaagccgaattcctggtctggggcaccaacgtccaagggggccacatcgatgatgggcaggcgggaggtcttggtggttttgtattcaatcactgtcttgccccaggctccggtgtgactcgtgcagccatcgacagtgacgctgtaggtgaagcggctgttgccctcggcgcggatctcgatctcgttggagccctggaggagcagggccttcttgaggttgccagtctgctggtccatgtaggccacgctgtttttgcagtggtaggtgatgttctgggagg

SEQ ID NO: 419 - DNA, 255 bp, Homo sapien
cctagcaagagaatcaccaaatttatggagagttaacaggggtttaacaggaaggaagtgcctttagtaagttctcaagccagaggctggaggcagcagctaaatcagaggacagcatcctcagtgaaagtgagccattcggggtggcatgtcactccaggaataaacacaacttagaaacaaatgatttcgtaggatagcacagtgacatggtgcactgtgaacctgaggccactgtgtcaaactgtgcactgg

SEQ ID NO: 420 - DNA, 261 bp, Homo sapien
cttctgatgataaccaacccctagctaccactctgtattcatcaggggaggggtataaaccccacatgcaagaagaacccttgcccccagtgtcaaatgggatggggatgctagagttatagtaaaggggaaaccctatgtaagctgttaacagagttcacaggggtagggataacccctgttctccagctcccaaatgtgctcactttcccagcttcttcatccgttcatcaatgctggcaaagttcccctcaactgtgg

SEQ ID NO: 421 - DNA, 179 bp, Homo sapien
ccttcctgttgttgtttcaaatgctgcttgatttctcgtaacagatctgcatctatgtaatacctttcttcagatctgactgctccaaaatgattctgcatcctgatttgagacatcaattcatttagtcggcccttgaactgagtaggtgcatttagttcaccctgaatcgtatccag

SEQ ID NO: 422 - DNA, 424 bp, Homo sapien
cgaggtccaaatctgatctgcagatgcagaagattcgacagaagctgcagactaaacaggctgccatggagaggtctggaaaagctaagcaactgcgagcacttaggaaatacgggaagaaggtgcaaacggaggttcttcagaagaggcagcaggagaaagcccatatgatgaatgctattaagaaatatcagaaaggcttctctgataaactggatttccttgagggagatcagaaacctctggcacagcacaagaaggcaggagccaaaggccagcagatgaggaaggggcccagtgctaaacgacggtataaaaaccagaagtttggttttggtggaaagaagaaaggctcaaagtggaacactcgggagagctatgatgatgtatctagcttccgggccaagacagctcatggcagagg

SEQ ID NO: 423 - DNA, 256 bp, Homo sapien
ctgtggcctagggctacctcaagactcacctcatccttaccgcacatttaaggcgccattgcttttgggagactggaaaagggaaggtgactgaaggctgtcaggattcttcaaggagaatgaatactgggaatcaagacaagactataccttatccataggcgcaggtgcacagggggaggccataaagatcaaacatgcatggatgggtcctcacgcagacacacccacagaaggacactagcctgtgcacgcg

SEQ ID NO: 424 - DNA, 330 bp, Homo sapien
ccagccgcatgggagtggaggcagtcatcgccttgctagaggccaccccggacaccccagcttgcgtcgtgtcactgaacgggaaccacgccgtgcgcctgccgctgatggagtgcgtgcagatgactcaggatgtgcagaaggcgatggacgagaggagatttcaagatgcggttcgactccgagggaggagctttgcgggcaacctgaacacctacaagcgacttgccatcaagctgccggatgatcagatcccaaagaccaattgcaacgtagctgtcatcaacgtgggggcacccgcggctgggatgaacgcggccgtacgctcag

SEQ ID NO: 425 - DNA, 333 bp, Homo sapien
  misc_feature (1)...(333): n = A,T,C or G
ctgctccatggnctcaaagtcagcaccacccacacccacaatgatcactgacatgggcaggttcgaggcacgcaccacagcctcacgtgtggcttccacatccgtcacagcaccatcagtcagnagaaacagnatgaagtattgngaggcantcccctgatgtgcagcctgggctgcaaacctggacctgcccgggcggccgctcgaaagggcgaattccagcacactggcggccgttactagnggatncaganctcggtacnaagcttggcagtaatcatggtcatagctgtttcctgtgagcggntgggatgaacgcggccgtacgctcat

SEQ ID NO: 426 - DNA, 411 bp, Homo sapien
  misc_feature (1)...(411): n = A,T,C or G
gggtgttcatcatgaggattgcttctgccatggagctgatggacgtgggcaggttgctgagaaggtggggtggaagtgagtgccgggggtgggtgagtgccctggtcttgttcataggggagcctttccctagcagtggaacgctgtggtcattttctctagcatattcccttgggaagtctagatttgctattaatctggctgagaatctaagttctgtgccttagagacagtttgcactttcccatattgtgcctgggacagccatatgattttttttcccaccaaacaagtatgcaaacagaaaccagttcaaagggggatggtgtaaaagatgaggcagtanaaatgcctttgaatggttttctgtagctaattctctttaaattttgtcctgctttttttctttat

SEQ ID NO: 427 - DNA, 450 bp, Homo sapien
  misc_feature (1)...(450): n = A,T,C or G
acgtgtacaagtttgaactggatacctctgaaagaaagattgaatttgactctgcctctggcacctacactctctacttaatcattggagatgccactttgaagaacccaatcctctggaatgtggctgatgtggncatcaagttccctgaggaagaagctccctcgactgtcttgtcccagaaccttttcactccaaaacaggaaattcagcacctgttccgcgagcctgagaagaggccccccaccgtggtgtccaatacattcactgccctgatcctctcgccgttgcttctgctcttcgctctgtggatccggattggtgccaatgtctccaacttcacttttgctcctagcacgattatatttcacctgggacatgctgctatgctgggactcatgtatgtctactggactcagctcaacatgttccagaccttgaagtacctgg

SEQ ID NO: 428 - DNA, 377 bp, Homo sapien
  misc_feature (1)...(377): n = A,T,C or G
cagggctatagtgcgctatgttgatctggtgttcatgctaagttccgcatcaatatggtgacttcttgggagtgggggaccaccaggttgcctaaggaggggtgaacctgcctacgttggaaatagagctggncaaaactcctgtgctcatcagtagtagaattgcacctgtgaatagccnccgccctccagcatgggcaacataacaagaccctgcctcttaaagataaaaattggaaaacactngtaggaaaaaaagggtgnttggtctaaataaatntggattgggnataaatgacncaaaactatcatgaatttgaaagcntttctaatttcttgaaagtctgaaaaaagttaaancncaattttatctnaaa

SEQ ID NO: 429 - DNA, 206 bp, Homo sapien
gttgctcctccaaagaaggttggcttcaaggccgtgtccagggacccacgagcagaggcactggggggcaagggatctccaagggggcaagggatccctaaagggggtagctcacaggtgagggggtttagggcccctctagggagcgcctgaggccatacattcaagagtgtccctggtgaggcccagggaagagccaggactgg

SEQ ID NO: 430 - DNA, 473 bp, Homo sapien
  misc_feature (1)...(473): n = A,T,C or G
ccttatttntcttgtcctttcgtacagggaggaatttgaagtagatagaaaccgacctggattactccggtctgaactcagatcacgtaggactttaatcgttgaacaaacgaacctttaatagcggctgcaccatcgggatgtcctgatccaacatcgaggtcgtaaaccctattgttgatatggactctagaataggattgcgctgttatccctagggtaacttgttccgttggtcaagttattggatcaattgagtatagtagttcgctttgactggtgaagtcttagcatgtactgctcggaggttgggttctgctccgaggtcnccccanccgaaatttttaatgcaggtttggtagntnaggacctgtgggtttgttaggtactgggtgcattaataaattaaagctccatagggtcttctcgtcttgctgtgttatgcccncctcttcacgggcaggtcaatttca

SEQ ID NO: 431 - DNA, 215 bp, Homo sapien
  misc_feature (1)...(215): n = A,T,C or G
cctgtatnaagctanaaaaagactaccagcccgggatcaccttcatcgtggtgcagaagaggcaccacacccggctcttctgcactgacaagaacgagcgggttgggaaaagtggaaacattccagcaggcacgactgtggacacgaaaatcacccaccccaccgagttcgacttctacctgtgtagtcacgctggcatccaggggacaagcagg

SEQ ID NO: 432 - DNA, 391 bp, Homo sapien
  misc_feature (1)...(391): n = A,T,C or G
ccagcactgccacaaactttttcagggccaccaggcgctgcccttccaggaccgggaacctgcccacttctatccgcaggatgtagtgcagtgcagattccaggtcagccatgtagatcctggagcgatctgccaatttccaaacagtgggagctatcttgttagcagtggttggtgcaactgtggtctgggcagcctccctggtgagcccagagagtctctgcaggtaagcggtatagaaggacctggattccatgagcacggggactcgggagacggagccattccggaacagcaggtagcaagaggggaagtcggtgacaccaaactttctcaccacattggcctctgtgttcagcaccctgcgcaccgccacncctttgtgctggga

SEQ ID NO: 433 - DNA, 420 bp, Homo sapien
  misc_feature (1)...(420): n = A,T,C or G
ctgtagcttctgtgggacttccactgctcaggcgtcaggctcagatagctgctggctgcgtacttgttgttgctttgtttggagggtgtggtggtctccactcccgccttgacggggctgctatctgccttccaggccactgtcacggctcccgggtagaagtcacttatgagacacaccagtgtggccttgttggcttgaagctcctcagaggagggcgggaacagagtgaccgagggggcagccttgggctgacgtaggacggttagtttggnccctccgccgaatgccgcanttctactgtcccacacctgacagtaatagtcancctcatcttcggcttgggctctgctgatggtcagggtggcccgtgntccccgagttggagccagggaatcnctcagggatcccanagggccn

SEQ ID NO: 434 - DNA, 239 bp, Homo sapien
  misc_feature (1)...(239): n = A,T,C or G
ccaaccangagagaagggatcgcctggtgcccagggcccaccaggagctccaggcccacttgggattgctgggatcactggagcacggggtcttgcaggaccaccaggcatgccaggtcctaggggaagccctggccctcagggtgtcaagggtgaaagtgggaaaccaggagctaacggtctcagtggagaacgtggnccccctggaccccagggtcttcctggtctggctggtncag

SEQ ID NO: 435 - DNA, 415 bp, Homo sapien
  misc_feature (1)...(415): n = A,T,C or G
ctgtccaatggcaacaggaccctcactctattcaatgtcacaagaaatgacgcaagagcctatgtatgtggaatccanaactcagtgagtgcaaaccgcagtgacccagtcaccctggatgtcctctatgggccggacacccccatcatttcccccccagactcgtcttacctttcgggagcaaacctcaacctctcctgccactcggcctctaacccatccccncantattcttggcgtatcaatgggataccgcagcaacacacacaagttctntttatcgccaaaatcacgccaaataataacgggacctatgcctgtttagggntntaacttggntactggccgcaanaattccatagtcaagagcatcacagnctctgcatntggaacttctcctggctntcagacctgn

SEQ ID NO: 436 - DNA, 152 bp, Homo sapien
ccaggattgacaggccatccattcacagccaggagatgctgggccagtccctccaagaggtctccgtcatggcagtgatgaaaacctaacagggtggccccctgtgccagctcaggtgactggagcccgagggcctgacaggttcccagcag

SEQ ID NO: 437 - DNA, 174 bp, Homo sapien
ccaggtactggcacatcatgctctggatgggggtggtggtgtcctgtaagcagagaaacaggaaattgtcgtagtcagtatcgagcagctgtggcctcgttcgccaccgtatagttgatcttgaacttctttggattctcagtcttctctccaaggaccttcttctcaacacag

SEQ ID NO: 438 - DNA, 485 bp, Homo sapien
  misc_feature (1)...(485): n = A,T,C or G
ccacggccctctcggccctctcgctgggagcggagcagcgaacagaatccatcattcaccgggctctctactatgacttgatcagcagcccagacatccatggtacctataaggagctccttgacacggtcaccgccccccagaagaacctcaagagtgcctcccggatcgtctttgagaagaagctgcgcataaaatccagctttgtggcacctctggaaaagtcatatgggaccaggcccagagtcctgacgggcaaccctcgcttggacctgcaagagatcaacaactgggtgcaggcgcagatgaaagggaagctcgccnggtccacaaaggaaattcccgatgagatcagcattctccttctcggngtggcgcacttcaaggggcagngggtaacaaagtttgactncagaaangacttccctcgaggatttctacttggatgaagagaggaccgtgagggtccccatgatgtcggaccc

SEQ ID NO: 439 - DNA, 317 bp, Homo sapien
  misc_feature (1)...(317): n = A,T,C or G
gggccgtcttcccctccatcgtggggcgccccaggcaccagggcagtgatggtgggcatgggtcagaaggattcctatgtgggcgacgaggcccagagcaagagaggcatcctcaccctgaagtaccccatcgagcacggcatcgncaccaactgggacgacatggagaaaatctggcaccacaccttctacaatgagctgcgtgtggctcccgaggagcaccccgtgctgctgaccgaggcccccctgaaccccaaggccaaccgcnagaagatgacccagatcatgtttgagaccttcagcaccccagccatgta

SEQ ID NO: 440 - DNA, 338 bp, Homo sapien
  misc_feature (1)...(338): n = A,T,C or G
ccanaaagacttcccagggaagatgcttggctctctgctccaaggtgggccatggtatagggccctcgaagggcttgtggctggggtgatcccagggggcattgctcaaagtgcacaggaggtggcagcagggtcaggcgagttcctgttccagggacatcaggagggagggtagaagcctagggagtgtgcgaggctgctgggatgagggagctcaggggctaccagctaaccagcctcagctcaatggtttctccatccttgggtctgtagtcagcaataccttgcaacagtggggtgttggggtctcggagaagctgccagaactccctttctcc

SEQ ID NO: 441 - DNA, 505 bp, Homo sapien
  misc_feature (1)...(505): n = A,T,C or G
ccacacagantcaccaagccacagacttgtcttccacaagcacgttcttatcttagccacgaagtgaccaagccacacgtactaaaggttgaactcaaagatatgtacagggtattaaacaaataccaaggggaacagttaacttcaatacaaggtcgaaatcagcaacaagttctacaatccagngctgatatcagatacaagcttcaaggacaatttcttttcgaaggcttattccagtttcgngaggctagcatgaggtgtgtgcatttgccaggggcaaatttctattctcaattaacccatgcagcaaatgctacncatggtgcngagtccgtttagaagcatttgcggtggacgatggaggggcccgactcgtcttactcctgcttgctaatccacnngngctggaaggnggacagtgaggccacggatggagccaccnatccacaccgagtncttgcgctctgggggtgcgatnatnttgatcttcatggtgctgggc

SEQ ID NO: 442 - DNA, 386 bp, Homo sapien
  misc_feature (1)...(386): n = A,T,C or G
cgccaggtgatacctccgccggtgacccaggggctctgcgacacaaggagtctgcatgtctaagtgctagacatgctcagctttgtggatacgcggactttgttgctgcttgcagtaaccttatgcctagcaacatgccaatctttacaagaggaaaccgtaagaaagggcccagccggagatagaggaccacgtggagaaaggggtccaccaggccccccaggcagagatggtgaagatggtcccacaggccctcctggtccacctggtcctcctggcccccctggtctcgatgggaactttgctgctcagtatgatggaaaaggagggnggacttggccctggaccaatgggcttaatgggacctanaggcccacctggtgcag

SEQ ID NO: 443 - DNA, 404 bp, Homo sapien
  misc_feature (1)...(404): n = A,T,C or G
cctccctctcagagcttgccccagggactctctggccctcagggttcaatgtattctgaccaaggccaagctttcctggggctcagggaaaatcacactttgctacccgaagctgtatcccctcagatgccaggaaggccgtgatcatctgactccaccctcctgagacacattctctccctgactgtcctgttctaagtcagcggagcaccttaggatggaggggtggaggcgaggccangatgcagcctctgtgaacaggtgcctggaggctgggaaatgaccctgagagggcaggacacagcnaccgngggcttaaggtgagggnggagagcaagnttggcccactttacaattctagntcagagccancccctaacatggngggcatttattcatttcgg

SEQ ID NO: 444 - DNA, 318 bp, Homo sapien
  misc_feature (1)...(318): n = A,T,C or G
catgggctatagtgcgctatgttgatctggtgttcatgctaagttccgcatcaatatngcgacttcttnggagtgggggaccaccangttgcctaaggaggggtgaacctgcctacgttggaaatagagctggtcaaaactcctgtgctcatcagtagtagaattgcacctgtgaatagccaccgccctccagcntgggcaacatagcaagaccctgcctcttaagataaaaattggaaaacactggtangaaaaaaaggctgtttggtctaaanaagtctggatngggtataaatgacacnaanctatcatgactnt

SEQ ID NO: 445 - DNA, 418 bp, Homo sapien
  misc_feature (1)...(418): n = A,T,C or G
ccagtccaacctgctcctcattattgtataaatgagcagaatcaatatggcggaagccagcttcaattgccaatttggtggcctctaaagctttacttttaggaacctctgcaggcgcataggtgccaaatcccaggacaggcatgaagtgaccatcattcagcttcacacactgatatttcgaatccatttctgtcactagcctggctggcaaatgtttctttcttcctccctcacaggctataagagcaatgagctggcaacgcccctgagcacactgtctgctgnttaaccaatggcatgtgagaggagggacagaggcagtcttacacaagctgtgataaaaattgcatncagttcaaccagtttcttacnttattctaatgngnaggaagtgtgngaagagcacaaagtcaga

SEQ ID NO: 446 - DNA, 361 bp, Homo sapien
  misc_feature (1)...(361): n = A,T,C or G
ctgtccaatnacaacaggaccctcactctactcagtgtcacaaggaatgatgtaggaccctatgagtgtggaatccanaacgaattaantgttgaccacagcgacccagtcatcctgaatgtcctctatggcccagacgaccccaccntttccccctcatacacctattaccgtccaggggtgaacctcagcntctcctgncatgcagcctctaacccacctgcacagtatccttggctgattgatgggaacntccagnaacacnacacaagagctctttatctccancntnactganaagaacagcgcgactctatnccttccagggggggggggtggggnntgnggaccttnccgggcc

SEQ ID NO: 447 - DNA, 321 bp, Homo sapien
  misc_feature (1)...(321): n = A,T,C or G
ccagganantggttccccaaaggggacctcacccgccccgagctctggagccgctgacgctcgcatccaggacatttgagatgggaatccaaataggctacttgnaaaagacgtgctgcangcagccctggagagactcatggagttcattgtacattactccatctaccgaggcagcgcatggcatgactnaacggcttgnaacaaacacanaaattaccaccacaaacattcaggaaccaaatataatctgctatggtcacaccacagacaatgcaggaagaggctttttattgctngngtgngttttcaaatcatgtt

SEQ ID NO: 448 - DNA, 325 bp, Homo sapien
  misc_feature (1)...(325): n = A,T,C or G
ccagcttcaactttttagtatagaagatacaggatcacaaaaaggagactacgctttgcaaacatagcatcaaaattcaacttttctctttgcagtttatccatggngtcagcataccttgcaagggaagctacttacatcaaataacttttctatatacatttcctcattgaccttttctcaaagaatatcttggttttgccgaacaaacataatataggngtctgccagatccattcctggtttctgtngtgaaggaaaagcagggggaacaaaataatatcagggtctcaatngtganattattatttaatcataccctgan

SEQ ID NO: 449 - DNA, 123 bp, Homo sapien
  misc_feature (1)...(123): n = A,T,C or G
cattaatnttggaagcgatggtgtggattacatcagtgttagggcatggtgtggatattattacattannattggaagcgatggtgtggattacatcagtgatagggcacggtgtggatatta

SEQ ID NO: 450 - DNA, 328 bp, Homo sapien
  misc_feature (1)...(328): n = A,T,C or G
ctggcaattttgagctgccggttatacaccaaaatgttctgttcagtacctagctctgctcttttatattgctttaaatttttaaagaaattatattgcatggatgtggttatttgtgcatattttttaacaatgcccaatctgtatgaataatgtaaacttcgatttttttttaaaaaaattagattttagctggagcttttgactaatgtaaagtaaatgccaaactaccgacttgatngggatgtttttgtaangttaattttctaagactttttcacatccaaagtgatgctttgctttgggttttaactgtttcaacntnggn

SEQ ID NO: 451 - DNA, 209 bp, Homo sapien
ctgccttgtttcaacagacatgcaaagatcctaggagacagtccccatagaccttcagacattaaaaagggagccgtacagtttgtttgaagcacttcgtcttacccatttatgcaggggccccaggaaacttacacacagccagaatgaggttcccaaaggacttacattaattatggctcttgcttcctttcacaaatgagctgagg

SEQ ID NO: 452 - DNA, 457 bp, Homo sapien
  misc_feature (1)...(457): n = A,T,C or G
ctgtctantcccttcaagagctgtttatagaagcttgagaatggggtaaaaatttctgctagcaaaatcaagttctttttgaaattttatcagtaatccagaatttagtagtccatgccttctcactcagcatttagaaataaaaatgtggtttcttaaacgtatatcctttcatgtatatttccacatttttgtgcttggatataagatgtatttcttgtagtgaagttgttttgtaatctactttgtatacattctaattatattatttttctatgtattttaaatgnatatggctgtttaatctttgaagcattttgggcttaagattgccagcaccacacatcagatgcagtcattgttgctatcagtgtggaatctgatagagtctngactccggccacttggagttgtgnactccaaagctaaggacagtgatgaggaagatggcatgtgg

SEQ ID NO: 453 - DNA, 277 bp, Homo sapien
ccaattgatttgatggtaagggagggatcgttgacctcgtctgttatgtaaaggatgcgtagggatgggagggcgatgaggactaggatgatggcgggcaggatagttcagacggtttctatttcctgagcgtctgagatgttagtattagttagttttgttgtgagtgttaggaaaagggcatacaggactaggaagcagataaggaaaatgactacgagggcgtgatcatgaaaggtgataagctcttctatgataggggaagtagcgtcttgta

SEQ ID NO: 454 - DNA, 198 bp, Homo sapien
gttaaaagatagtagggggatgatgctaataatcaggctgtgggtggttgtgttgattcaaattatgtgttttttggagagtcatgtcagtggtagtaatataattgttgggacgattagttttagcattggagtaggtttaggttatgtacgtagtctaggccatatgtgttggagattgagactagtagggctagg

SEQ ID NO: 455 - DNA, 608 bp, Homo sapien
  misc_feature (1)...(608): n = A,T,C or G
ctgagcaagctaaggaccaggggcaactagaccctaataatgngtacttttgaaaatgatacaaactaccttggttgtaagaagtgcaggttgaacactttaggagaacagtcttcaaactggcaattcaaaatttcccattatatgtgaataaaattggaaggatgttaaatgtccatggaaagttactcttgtaagttaggatgccttatactgaggctttanaatgaaagtacacttcacaaatggaatagtgaacataaattaccagaagtcaagataatagtcatactagtaaggtaagcaaggtaaattcccttatacacaaaaattattttgatgacctttttcaataatgaatctgaaatgaagtgttttaaaaagctccctaaacacaaaacgaacataaaactgcttaataactttagagctcatgtaatattcttgctgaaaacagttactgaaattaccagcgaaatgatggaatatctttaaagcaggncactcngtataatctggaataatttcatttgctaacttttaagaagtattctctggactataaatcntgggcaaatagacttccactttattattaccccaaatta

SEQ ID NO: 456 - DNA, 467 bp, Homo sapien
  misc_feature (1)...(467): n = A,T,C or G
cctggacctgtgtaaaccttcaaacactcttttttacattaggtcgtgaagttaaattttttactgtttctgtgctacagactcttcaaagggaaatagttaagtcaatttcaaagaaaatgaccagcacatttttaaaacattagaaatgatttgactttgactatctactgccaaaaaaaggttaaggaatttgtaatgagaagctaaaaactttaaggaattttaaggaactcaaaacaaaaactcattaaatgtaattaaagtgaattctacaaataaagcctcttaatacatttctataatagtcacttaagacttaaattcaaacactagcaaaccacaaaatcagactgtntgactgacatccaaaagataaatataaatcaaaatccgaccccagcattagccaaggggtaggtgttcctcttgaggaaggcaggaattcctcttctgccacctgttgg

SEQ ID NO: 457 - DNA, 183 bp, Homo sapien
  misc_feature (1)...(183): n = A,T,C or G
ccaaattttntactttaaacactgaaaacagaggaagttaataaaaattttaacctataaagtcccctggttgttagtcattaacagcagattgtcagataagactggtaaaatgatggctgctaagcatttgatgatccaggcgcaggatgatcaaactgcagcagatcatgcacgtgacag

SEQ ID NO: 458 - DNA, 445 bp, Homo sapien
  misc_feature (1)...(445): n = A,T,C or G
gaaaaatataaagccaaaaattggataaaatagcactgaaaaaatgaggaaattattggtaaccaatttattttaaaagcccatcaatttaatttctggtggtgcagaagttagaaggtaaagcttgagaagatgagggtgtttacgtagaccagaaccaatttagaagaatacttgaagctagaaggggaagttggttaaaaatcacatcaaaaagctactaaaaggactggtgtaatttaaaaaaaactaaggcagaaggtttttggaagagttagaagaatttggaaggccttaaatatagtagcttagtttgaaaaatgngaaggactttcgtaacggaagtaattcaagatcaagagtaattaccancttaatgtttttggcnttggactntgagttaagattattttttaaatcctgaggactancattaatgggacag

SEQ ID NO: 459 - DNA, 426 bp, Homo sapien
  misc_feature (1)...(426): n = A,T,C or G
cctatgatancttctctagctatcatactccaatcagcaaaaaatgagaaaatgttgagaaatagaagataattcctcatttaaggccaccttctagaatttgtgcttaagattctgctttcttctcatgggccagcacttcggcaactggcaaaaattaggtgtacagggatctaggtaatactgtttatttgagcaataatatattgtgctaacgttcaggcatcctattactgagaaataagggaaaatgagtgtaaagtacaactaagagtctcggcgacagggaaaaataccatcagttaaatatccatagtcctagagcatttatgtaaaactgcaatntgaatcctgcaatacatnttggctttttccctcagtgataccatgtgagggaagnngctctgtcaaggcgggccggataga

SEQ ID NO: 460 - DNA, 348 bp, Homo sapien
  misc_feature (1)...(348): n = A,T,C or G
ccaaattttaaaatgttatttttcatatcatttataaccttgtcacaatccacttaaagaagtttggttatatttcactgaaaattttcttccagagtaggttttttttcgtgggttggggggtaactttactacaattagtaagtntggtgcagaatttcatgcaaatgaggagtgcagcagngtgataatttaaacatatntaaacaaaaacaaaaaaaatgaatgcacaaacttgctgctgcttagatcactgcagcttctaggacccggtttcttttactgatntaaaancaaaacaaaaaaantaannacnttgtgcctgaaatgaancttgtttttttntna

SEQ ID NO: 461 - DNA, 378 bp, Homo sapien
  misc_feature (1)...(378): n = A,T,C or G
ccactaagacagaacggaatctagtagaagtgcaccaatgcttcagtccctcctactcagcatggtgagcagtggtcaatctgtgccctgtggaatgatgggcagataattctggcatgtgtaaataataataaataattcacttggtgcaggcagtatgtctatgaattaaaacctagtgtgtacacagtgcctacatgtgttacagccccacagtaggaatctacaccaaaatatttattagaaggaatttggtccgtactacatcacgctttccggagggtaaaaaataaagtccatctatagacatttcaccacagacccagagactgagtctggctaaaacctgcaaaatgtctataacaaaagnggatggct

SEQ ID NO: 462 - DNA, 197 bp, Homo sapien
  misc_feature (1)...(197): n = A,T,C or G
gcgaggtccacactattaaaagctgttgggtaattgaaggtgatataaaatgactgtcntcatttggagtgngcagcacanttacttcatgttgctcangtttanaacaatntcccctgnaagttctcacacagatnggnagaaatcatacctanttntggtnaatcactatggcagccgtngaagaatntaagaga

SEQ ID NO: 463 - DNA, 279 bp, Homo sapien
  misc_feature (1)...(279): n = A,T,C or G
cataagtgatgangaggnaaaatcantnaataagcctacaacntagaatacattaaaacttgcacatatacatgttcacagcatgtatacaatgataatccctacggtttaaccaagttatggttcccttctacagcagacacaaaaccaaggtgaactaggtnggcagatgtanagggaataccaaaaaaagggtaatnngntcactgattctgaagnatntgactgancatactgagcttctgnactttgggaatgcatnnaggnaacaatatcttg

SEQ ID NO: 464 - DNA, 552 bp, Homo sapien
  misc_feature (1)...(552): n = A,T,C or G
gatgggttgataggtgcagcaaaccaccctggcgcatgtttaccaatgtaacaaacctgcacatcctgcacaggtactccaaaactaaaagtaaaaaaatctaaaagaaaaaagaaaaagaattaaacccaaaatcacttccccatctggacttgatttagatgaaaagcttctggactttgagctgatgctatagtgggttgaaaattttggggtcctcagaaggggatgaggatatattgcatgagagagcaacatgaatcatngagagccagagtatagagagnggtgggtagactgtaggagagccctcaatgatcccggctgtcttgtattcgcgttgcacttacttgtataatatggcagatgggatgtgatgtcactttcaagattangttataaatagactatggcttcaatcagagggttttcttctctgtctanctctcttttgggtagnttcattctgagagaaagccanacctcngccgcnacccacgctaaggggcganttccagcncactggcggccngttactagtggatccgngct

SEQ ID NO: 465 - DNA, 444 bp, Homo sapien
  misc_feature (1)...(444): n = A,T,C or G
ccactcttggtagaaaccttgaaactttcaccttgctgggctttagcaaagtttccttttacagttctgtttatgagcttcagctactgataaagcacttcctgaacttctctattatcatagngaccctctgaataacctgagtgactggctcggcaattcgctttataaccattcttattcccaaagttggagcacataaacatttagatgtcttttcctgtaaaatattctagacatttacccaaactctagttcaacatatactcaacttgcactgtatatctccctgcttttttgagacagagaagaaattcaggaggtgncccatctccagagtttctctgttggaaagcagcnatcaagaancctttaaaaaattggtgtnaagctntgccncctgcagaaatgcntngccccacattattcttctggggnaaagna

SEQ ID NO: 466 - DNA, 381 bp, Homo sapien
  misc_feature (1)...(381): n = A,T,C or G
cctactatgggtgttaattttttactctctctacaaggttttttcctagtgtccaaagagctgttcctctttggactaacagttaaatttacaaggggatttagagggttctgtgggcaaatttaaagttgaactaagattctatcttggacaaccagctatcaccaggctcggtaggtttgtcgcctctacctataaatcttcccactattttgctacatagacgggtgtgctcttttagctgttcttaggtagctcgtctggnttcgggggtcttagctttggctctccttgcaaagttatttctagttaattcattatgcannaggtataggggntagtccttgctatattatgcttggttataatttttcatctttc

SEQ ID NO: 467 - DNA, 95 bp, Homo sapien
  misc_feature (1)...(95): n = A,T,C or G
cctatanattntggnttgtatactgggtcctgaaaaccctcttggngctctgtttttaaggagctgaanccaangancgccaataataatacttt

SEQ ID NO: 468 - DNA, 224 bp, Homo sapien
cagtgggtctctgatgccttgcctgcagcagaaggagggagcagagatcaagaggaaggaaaaaatcatatgtacttatttgaaggtaaagattattctaaagagcccagtaaggaagacagaaaatcatttgaacaactggtaaaccttcagaaaacccttttggagaaagctagtcaagagggccgatcactccgaaataaaggcagtgttctcatcccagg

SEQ ID NO: 469 - DNA, 416 bp, Homo sapien
ctgagttctagttcaaaagctttatccttaacttcgtcatgtactatgtaaattctagaatagaaaagggaaaggtaagattttggtaacctccaaacattgaagtagttcacagacccaaagtcagtacaaattagaatgtccatccataataaaagtatctataaaattacacagacacattctacatagtatttaacattagagaagacaaattacacagggactgaaataaaatgaaacatctactctcccgacaaatgttgaatatacctaatcaacccaagttcagtttatttttgcacattgctttagagatataacttggctgggcacagtggctcacacctgtaatcccaacactttgggagaccaaggcggatggatcacttgaggtcagttcgagactagcctgg

SEQ ID NO: 470 - DNA, 376 bp, Homo sapien
caccttttaactgtatcacaaagtctgttgctgtggttacagcctttgtttccagtgatgttttgtccatgctttcccccaacccttaacaatggttactcaaaagaatgaaataatgagtcattcattcgggaatatgttaaaatatccctctttatcattacatttcactgcttagaaactaggctgtaattcaaggcaacagttaagtctgagaactgttaaaaaaatctttgattttttttcatttttaagaaaaacctgcctatttaattgttcagacttgtaagaggttcttcaattacatcctttttggttaatgtattatttctggaacaagtagataaaattctacgcagtaagcataataaaaatc

SEQ ID NO: 471 - DNA, 357 bp, Homo sapien
ggcttcgtataatggttcttttgtcacccctgatcgacgatttcgctacccgtacaactctgacaagggaacgaaatgcttctgtgtattcacctagtggtcctgtgaacagaagaacaacaactccaccggatagtggagtactgtttgaagggttaggcatttcaacaagacctagagatgttgaaattcctcagtttatgagacagattgcagtaaggaggccaactacggcagatgaaagatctttgcggaaaattcaagaacaagatattattaattttagacgaactctttaccgtgctggtgctcgagttagaaatattgaagatggtggccgctacagggatatttcag

SEQ ID NO: 472 - DNA, 557 bp, Homo sapien
  misc_feature (1)...(557): n = A,T,C or G
cngagatgacatttacaatctcttgaaangcagcagatggcactctggtgcttcctatgaagcaacatgcttgaaatcaagggccaacaattgttgtaggaaagcaaaatatacctctaacacctacgtttaccaaaaaagctgacatctcaaactctgagttgttgagactcaaatttctcatccccaaagaagcctattacggtagtgtgntggatgctttttgtatctctgataggcaggcactataatggggggaaatacttctgaataaaaacattggctgtcttgcaactgtgcatataatgtctattcaagggggcagtgtgcctagcatgatcctgaaatgttgagataaaaggaagttggcattaaagcactatttgtcttatatgaaaagagtgactctatcttccagtaaacaaganttcctgcaatgaaaaagaaattttttccttcattatctataaactatacaaaataaccttcctttttaacctaagactcaaacattnatatttgattttattctatttgataccaattggtatgtccag

SEQ ID NO: 473 - DNA, 264 bp, Homo sapien
cctccatcaacagaaaggataaagaccccttcgggtctcctcattaattctgaactggaaaagccccagaaagtccggaaagacaaggaaggaacacctccacttacaaaagaagataagacagttgtcagacaaagccctcgaaggattaagccagttaggattattccttcttcaaaaaggacagatgcaaccattgctaagcaactcttacagagggcaaaaaagggggctcaaaagaaaattgaaaaagaagcagctcag

SEQ ID NO: 474 - DNA, 165 bp, Homo sapien
aattcagcttccagaggcccttattagtccttgttgacagaaacatagatttggcaactcctttacatcatacttggacatatcaagcattggtgcacgatgtactggatttccatttaaacagggttaatttggaagaatcttcaggagtggaaaactctccag

SEQ ID NO: 475 - DNA, 417 bp, Homo sapien
  misc_feature (1)...(417): n = A,T,C or G
aagttctcttcttgttttaaacacattcctgataacttctaaagatgaccaaaataaaacagaatatctacagagatcattttctgaattttttgtacatccaaggataacaacataaaaaaaataaaactggacagcattccacatccaagtgcacagaaccatttttgcaagattaaataatgtaaacattgggaacagccaaatcagcgaagaatgccaacacctcaaaacacctggtgttgccgcttcattaagtggttcaaaatccagatctataattgcgcaatattcaccgtatataaaaagaaatggatattaattttgacaaatagctgcaactgagacttctttttatttctttatatgngnatatagtgaatttttattatttttaaaattttatttattttttta

SEQ ID NO: 476 - DNA, 321 bp, Homo sapien
  misc_feature (1)...(321): n = A,T,C or G
catttaataacaaaaacaacctgtacggaaaacccnaaggcaaccacatagcatatgtaaaatgtgcaaatacactttaaaatgcangttattctatagcanttgcaagatagaatttcactgtaattagggaatctagctcatcctaacttaatagncttttgcatgtntagacaatgcaattctacaaggnacnactcagcgttgatgctaaagtatgaaacacatcctcagattattcatccgaaaatattaaaatagcntcatgttttattattctttaatgagtcntgagctcatttctaaagcttcataaagcat

SEQ ID NO: 477 - DNA, 546 bp, Homo sapien
  misc_feature (1)...(546): n = A,T,C or G
gctgtggttatattgtaaatgaagcatctaacatgtgcacaacttgcaacaaaaactccttggactttaaatctgtctttctcagtttccatgtgctgattgatctgactgatcacacaggcacccttcattcctgtagtctcacaggaagtgttgctgaggagactttgggctgcacggtacatgagtttcttgcaatgacaaatgaacagaaaacagcattaaagtggcaattcctcttggaaagaagcaaaatttatttaaaattcgttctatcacacagagcaaggagtggattgaaaattagtgtactctcgtgcaagcttgcagatcctactgaggcaagcagaaacttgtctggacaaagacatgtttaaaacggtctatcattttgaactctggaaaagtataagagttttaactccctttaaaatggaatattaatttgaaaattatggggaaaattgcattttgtttacatgtggtgaacatgtttctagaaattggtatggcgggaagggggctgggtgagtctgaaggacctcn

SEQ ID NO: 478 - DNA, 100 bp, Homo sapien
aagaaaagtggtaaaatcaagtcttcttacaagagggagtgtataaaccttggttgtgatgttgactttgattttgctggacctgcaatccatggttcag

SEQ ID NO: 479 - DNA, 508 bp, Homo sapien
  misc_feature (1)...(508): n = A,T,C or G
gnnttccaaattcttctaactcttccaaaagccttctgccttagttttttttaaattacaccagtccttttagtagctttttgatgtgatttttaaccaacttccccttctagcttcaagtattcttctaaattggtcctggtctacgtaaacaccctcatcttctcaagctttaccttctaacttctgcaccaccagaaattaaattgatgggcttttaaaataaattggttaccaataatttcctcattttttcagtgctattttatccaatttttggctttatatttttctatcttctatacttctccaatacttgtcttagcttgtttttcattttctatctgaaactcttgacaatatcttctaatttccctatcttctctattcttttcttcgccttcccgtacttctgcttccagntttccacttcaaacttctatcttctccaaattgttcatcctaccactcccaataatctttccattttcgtgtagcacctggncag

SEQ ID NO: 480 - DNA, 81 bp, Homo sapien
ggtgcccttttcctaacactcacaacaaaactaactaatactaacatctcagacgctcaggaaatagataaggaaaatgac

SEQ ID NO: 481 - DNA, 306 bp, Homo sapien
  misc_feature (1)...(306): n = A,T,C or G
tcgccttcggccgccgggcaggttaggggnacaagacgctacttcccctatcatagaagagcttatcacctttcatgatcacgccctcatagtcattttccttatctgcttcctagtcctgtatgcccttttcctaacactcacaacaaaactaactaatactaacatctcagacgctcagggaatagaaaccgtctgaactatcctgcccgccatcatcctagtcctcatcgccctcccatccctacgcatcctttacataacagacgaggtcaacgatccctcccttaccatcaaatcaattgg

SEQ ID NO: 482 - DNA, 582 bp, Homo sapien
  misc_feature (1)...(582): n = A,T,C or G
ggggggaacagtcattatacattatttagactcattccttcttccagtgcccttatgattatttcctacctttaccattgatcttaaactgngcaggctaaaaagaggaaccagaactcccttaagcacttttaagactatttaaaaaataaagntttgttggcattgaagagtaagctgcttaagggactgaatgaaaagatagtaccctttgtggctgtatgaagagagaaactgaatttctatccaagagaccttaatntagcctattagggaattatcttccccaaaagtacaagtaattttgcactgcaggagaaggataagtagatttgatttacatcacattttatacacacctttcaaganggagaaatctgcttcataaatagnaggaatctatgcttaaactnaacatttaatggtgacntcttacaacagccttgaaaannattggaantcngacntganggnggaaactggaanaaagaatatctttctcttctgcatcctttnatcctcaaacttagcatggattcacacgctgaggaaangttnggtnacnaccngaacatttagata

SEQ ID NO: 483 - DNA, 275 bp, Homo sapien
  misc_feature (1)...(275): n = A,T,C or G
gcctcactaaaataacagatttcagtatagccaagttcatcagaaagacccaaatggaatgatttacaaaatagaacactttaaaccaggtcagtcctatctttttgtagctgaaggctatcagtcataacacaatttcgcgtacacctctgctcattatggaattacacttaaaacgaatctcaagagggtgaccattgttgtttcagataccatccctaaggagagtggttaacaggaagattgccagngttactgatggaaagaagcgcttg

SEQ ID NO: 484 - DNA, 434 bp, Homo sapien
catatttccacaggccaatttctttctgtttttctgctaagctatttcagcattttagcttttcctctttgctttgtttactcatgattgccagatggctacgttacctctaagcatcagatcctcacaaattaatggttaaatgtaagggagggattttactctcttgcattaaaaaaaagctttattgagatataatttactgtaacattgactcatttaaagtatgctagtcaatagaccaaatcttgaataaactcccattcacaattgctacaaagggaataaaatagctgggaatatagctaacaagggaagtgaagggcctcttcaaggagaactacaaaccactgctcaagaaataagagaggatacaaacaaatggaaaaacattccatgctcatgaataggaagaatcaatatcgtgaaaatgg

SEQ ID NO: 485 - DNA, 291 bp, Homo sapien
  misc_feature (1)...(291): n = A,T,C or G
ncaccactgcagccctacatacagttgaaaaaaaattccattctgttaacatttgttttataagttttcacgcaatacacaaaaaacccctctgcacttcttgtaaagaacaaaaaagatacacaacagttaagcgtaaagatcacaggcaatagcattcaaacatggatgtgggtagagaaaggagtacctggcatgagtacctgcttagtttgactgaatccttgatttttaatttggcttttcatgggccgctcacaacaccaacgctgtgtgaggtatggtagtcag

SEQ ID NO: 486 - DNA, 274 bp, Homo sapien
ctgtaatattgtagttgctccagaatgtcaagggcagcttacggagatgtcactggagcagcacgctcagagacagtgaactagcatttgaatacacaagtccaagtctactgtgttgctaggggtgcagaacccgtttctttgtatgagagaggtcaaagggttggtttcctgggagaaattagttttgcattaaagtaggagtagtgcatgttttcttctgttatccccctgattgttctgtaactagttgctctcattttaatttcactgg

SEQ ID NO: 487 - DNA, 184 bp, Homo sapien
  misc_feature (1)...(184): n = A,T,C or G
tggcaccaagattctcagctcacggtaccagcatctgattgtcggactacctgctgctttccctgatatttatacatgatattcgnaaaatgtaaagaagctattattcatacagacatctagagaaggagngaagnttttaaaaaaataaaaaaatacttatttcaagctttagctgtgttct

SEQ ID NO: 488 - DNA, 393 bp, Homo sapien
ctgcatttttattgcgatctgcagatgaactggaaaatctcattttacaacagaactgggacagacgaccaccatattcactgaggtctaaatttgcagtttccactaatgacattttgatttcccaacagagatacttctggtcttactgcacagtcttttaagagaaatacttccattatgccacattgtccttgatccgtaagtgatgtgttaaggtgcttcaaaggaactctgacctctgaagtacttgagctactttagtatgtccagcctattgctttttgttttagtgtgtcaccataaatatcaggggcataaaaggctatctattcttaattcaaggataaaacagaagaagcttgtggtataaaacaatagttcaagatccag

SEQ ID NO: 489 - DNA, 607 bp, Homo sapien
  misc_feature (1)...(607): n = A,T,C or G
gtgcttatgtacttaaggggaactactctaactgggtgaagagtangatgaagcatccatgtccctacaaaggatatgaactcatccttttttatggctgcatagtattccatggtgtatatatgccacattttcttaatccagtctatcatcgatggatatttgggttggttccaagtctttgctattgtgaatagtgtcgcaatgaacatacatgtgcatgtgtctttatagcagcatgatttataatcctttgggtatatacccagnaatgggatagctgggtcaaatggtatttctagttctagatccttgtggaattgccacactgtcttccacaatggttgaactagtttacagtcccaccaacagtgtaaaagtggtcctatttctccacatcatctccagcacctgttggttcctgactttttaatgattgncattccaactggtgtgagatggtatatcaccgtgggtttgatttgcatttccctgatggccagtgatgatgaacnttttttcatgtggtttttggctgcataaatggcctgccttttntacttctataaaatttttcanntcttattattattcctgggggnttaag

SEQ ID NO: 490 - DNA, 179 bp, Homo sapien
  misc_feature (1)...(179): n = A,T,C or G
cttctaggaatactagtatatcgctcacacctcatatcctccctactatgcctagaaggaataatactatcactgntcattatagctactcccataaccctnaacacccactccctcttagccaatattgngcctattgccatactagtctttgccgcctgcgaagcancggtaggacc

SEQ ID NO: 491 - DNA, 399 bp, Homo sapien
  misc_feature (1)...(399): n = A,T,C or G
cctctacctgtaatcacattaatttttctaaagacaggggnggtgttttgaagataaatgtcattagtctatgataatagcatcataggacaattagccattttagacttgaccatattttctctttttagcatatagccatcttgatatttaggngggagactactccaatggagcaacagtttcattttacatgattggatttagaaatttacaaattttaaactcataagaattctaaataatttgaaaatggaaacatttgacccacagtctagcagcataaatacatttataaaatacttcattgttgatcttaggtcattgatttaaaacagaatttggtgactatgggcaggtggagggggccngtgaggaaggtataaaagagaaatcttt

SEQ ID NO: 492 - DNA, 482 bp, Homo sapien
  misc_feature (1)...(482): n = A,T,C or G
ctccaccttactaccagacagccttagccaaaccatttncccaaataaagtataggcgatagaaattgaaacctggcgcaatagatatagtaccgcaagggaaagatgaaaaattataaccaagcataatatagcaaggactaacccctataccttctgcataatgaattaactagaaataactttgcaaggggagccaaagctaagacccccgaaaccagacgagctacctaagaacagctaaaagagcacacccgtctatgtagcaaaatagtgggaagatttataggtagaggcgacaaacctaccgagcctggtgatagctggttgtccaagatagaatcttagttcaactttaaatttgcccacagaaccctctaaatccccttgtaaatttaactgttagtccaaagaggaacagctctttggacactaggaaaaaaccttgtagagagagtaaaaaatttaacacccatagtagg

SEQ ID NO: 493 - DNA, 207 bp, Homo sapien
  misc_feature (1)...(207): n = A,T,C or G
cataaatattatactagcatttaccatctcacttngnggaatgctagtatatcgctcacacctcatatcctccctactatgcctagaaggaataatactatcactgttcattatagctactctcataaccctcaacacccactccctcttagccaatattgtgcctattgccatactagtctttgccgcctgcgaagcagcggtagg

SEQ ID NO: 494 - DNA, 283 bp, Homo sapien
  misc_feature (1)...(283): n = A,T,C or G
ccaattgatttgatggtaagggagggatcgttgacctngtctgttatgtaaaggatgcgtagggatgggagggcgatgaggactaggatgatggcgggcaggatagttcagacggtttctatttcctgagcgtctgagatgttagtattagttagttttgttgtgagtgttaggaaaagggcatacaggactaggaagcagataaggaaaatgactatgagggcgtgatcatgaaaggtgataagctcttctatgataggggaagtagcgtcttgtagaccta

SEQ ID NO: 495 - DNA, 590 bp, Homo sapien
  misc_feature (1)...(590): n = A,T,C or G
tatgtatataattttcttagttactagcatagagaaattactgatttaaaaaaacatttcaaattctagcatgttgtaggattctattgccctttctaaaaagtacatcttgcttatccgatttctaacaaaactatttaatttgaagaagggagaatgaatttggataaaaagcaaaaatttaaaggtactcaaatttaggcaaaccattaaagcaatcttagtttacagttaattgggtagaatggtcaacactttcttcaggttagttcatggagtggatatgcattgatagaacaacttagagatgcttttacagttgagaaagctcattatatttgttatctttaagaatcagcttatttatttcatatgtttgttctttaagaagaccaaagagccctgcaaatgaatgttgatttgtttttttgtttgtttaatatttttgtagagataagatctcactttgttatgttgcccaggctggtctcaaactctcaacttgaagtgatctgcccacctcagcctcccaaagtggtgggattacaggcatgagccaccgcacctggacctgcccgggcggncgctcg

SEQ ID NO: 496 - DNA, 307 bp, Homo sapien
  misc_feature (1)...(307): n = A,T,C or G
ggagattagtatagagaggnanacnttttttcgngatatttggtcacatggataagtggcgctggcttgccatgattgtgaggggtaggagccaggtagttagtattaggaggggggnngttagggggtctgaggagaaggttggggaacagctnaataggttgttngntgatttggntaaaaaacantagggggatgatnctaataattantgctgtgggtggttgtgntgattcaaattatgngctttttcggaganncatgtcangtggtagtaaatataattgttgggaccattanttcttan

SEQ ID NO: 497 - DNA, 216 bp, Homo sapien
  misc_feature (1)...(216): n = A,T,C or G
cattttcctcttggtttcttcagttaagtcaaanngncacgttcctctttccccatatattcatatatttttgctcgttagtgtatttcttgagctgttttcatgttgtttatttcctgtctgngaaatggtgtttttttttgttgttgntggtttttttttttttttttaaactnggnaccncnaanttgaaaaaatgnttntttttccctnaca

SEQ ID NO: 498 - DNA, 375 bp, Homo sapien
  misc_feature (1)...(375): n = A,T,C or G
gaatttcctggcaccttttctcgctagagaagattnngtgtgactgggttgcctataagccatatagatacaaacttttatctctaataccaagtcttagagggatatattaatagatctaataaatttattcttagacttattgtttcatgggntagtgagtctttgctactggagacaatacagacttgtcagtttttttaaaaaaaaaaaatttgccaagctancacattaaaaanatntcctaaggctntcattttatgaggatgattataaacntttntgngataaatatcaccataataaactgttaagtacaactgcnggccncccttanagngaattcctncagttanaaatttatttttttgccaa

SEQ ID NO: 499 - DNA, 215 bp, Homo sapien
  misc_feature (1)...(215): n = A,T,C or G
ccacnaaagcagaagcttaaagcatagtagtaaagaggnnaaaaagaaggacgaaaataaatcagatgacaaggatggtaaagaagttgacagtagtcatgaaaaggccagaggtaatagttcactcatggaaaagaaattaagtagaaggttgtgcgaaaatcggagaggaagcttgtcacaaaaaaaaaaaaaaaaaaaaaaaaaaatgtttt

SEQ ID NO: 500 - DNA, 489 bp, Homo sapien
  misc_feature (1)...(489): n = A,T,C or G
ccactacgataagcaggtagctgggttttgtagtgagnttgctccttaagttacaggaactctccttataatagacacttcattttcctagtccatccctcatgaaaaatgactgaccactgctgggcagcaggagggatgatgaccaactaattcccaaaccccagtctcattggtaccagccttggggaaccacctacacttgagccacaattggttttgaagtgcatttacaaggnttgtctactttcagttctttactttttacatgctgacacatacatacactgcctaaatagatctctttcagaaacaatcctcagataacgcatagcaaaatggagatggagacatgatttctcatgcaacagcttctctaattataccttagaaatgttctcctttttatcatcaaatctgctcaagaagggctttttatagtagaataatatcagtggatgaaaacagcttaacattttaccatgctta

SEQ ID NO: 501 - DNA, 286 bp, Homo sapien
aaaaacactcaaacacagccttggagggaggagtcagttttaaaagactcttataaaagtaatatactgctagctctgaagaatcggaggctaaaatcatctcttcaagtccccagggaatcccaaagaactccaggggaaggtgggatgggccagagagctctggaagcttccaggtctgttgcaagcctcacctggtacacagtaggctcttccaggtctgtcaggaacccaggagcctcccctagcacacagtaggctcacaaaaagggagcactgctgctgg

SEQ ID NO: 502 - DNA, 168 bp, Homo sapien
  misc_feature (1)...(168): n = A,T,C or G
cctatgattgtgggggcaatgaatgaagcgaacagagnttcgttcattttggttctcagagtttgttataattttttatttttatgggctttggtgagggaggtaagtggtagtttgtgtttaatatttttagttgggtgatgaggaatagtgtaaggagtatggggg

SEQ ID NO: 503 - DNA, 173 bp, Homo sapien
  misc_feature (1)...(173): n = A,T,C or G
cctttataataaattaggcaaaaggttcagtgcnnggctatantggacaacatgaaactccataaaaatgactggatagggggactgcttgagacttttcttttgggcattactaacagaattcaaagaaattccaaccacgcttatttttccaaattctactgaaatgagag

SEQ ID NO: 504 - DNA, 310 bp, Homo sapien
  misc_feature (1)...(310): n = A,T,C or G
tagtattctatttaaaaattaagttttggggtctgtaaaatatacaggacaatgacttttttaaaatgtaagttaatacctcctcctcacttgtcttaattgaacttaggtgtttattcttaaaggnggaccttgatgaaaatgttgagatgggaagtgttattaggcaaaacttgttatagatttctcatataactcttaattgacccttagaattttaacaaccgcgcctggcccaatagactgttttttagagtanttttaggctctcancaaaattgaggggaaaatacagggtgttcccattaaa

SEQ ID NO: 505 - DNA, 530 bp, Homo sapien
  misc_feature (1)...(530): n = A,T,C or G
cctcagggaacttacaattatggcaaaaggggaaggggaagcaagcaccttcttcacaaggcatcaggagagagagagaaagagagtaggggaaactaccccttttaaaccatcatatcctgtgagaactccctcagtattagaagagcatgagggaaaccgcctccataatccaatcacctcccaccaggaccatccctcaatacatgggggttacaattcaagatgaggttcgggtggggatacagatttaaaccatatcagaatggttaatgatattgttgtattttaccaactataatcttcttagtgttatagtacaataatgtaaaaaattgagtaaatttgttttctatattattctgtttttggaaaacatgtatatagtcagggctgtttgtctcaagaaaatatggtaaactctgctgttttggtcactggtgcctagaatttggggatgtacattggttttgattcacatgcacatttccttctagttcacagtaactatttctaactatttcccnata

SEQ ID NO: 506 - DNA, 352 bp, Homo sapien
  misc_feature (1)...(352): n = A,T,C or G
cttgaacgctttcttaattggtggctgcttttaggcggtactatgggtgntaaattttttactctctctacaaggttttttcctagtgtccaaagagctgttcctctttggactaacagttaaatttacaaggggatttagagggttctgtgggcaaatttaaagttgaactaanattctatcttggacaaccagctatcaccaggctcggtaggtttgtcgcctctacctataaatcttcccactattttgctacatagacgggtgtgctcttttagctgttcttaggtagctcgtctggtttcgggggtcttagctttggctctccttgcaaanntatttctagttaatt

SEQ ID NO: 507 - DNA, 370 bp, Homo sapien
  misc_feature (1)...(370): n = A,T,C or G
cctaactagatcttatcagaataggggggaagggngtcggttcatccttattgagtgttaatgaccctgtaagatgtaatttcttttatttcattctgttacctagaaaatctatcacagccttgtagtattgattgctcaatctataaagagctcagtttacagcatgactgttagtaacagggntattttaatgagtgactcttcaacacctcagagtttcactaaattccaacccatcagcccagtagtctaacattaagggtcttaggaaatgagaacttatcacctttccttatcatgaaaaggtaacctccaggtaaccaaaaatagaacttcctctgtgttcgttttttatagaaattactgg

SEQ ID NO: 508 - DNA, 129 bp, Homo sapien
  misc_feature (1)...(129): n = A,T,C or G
ctgttaaaagaacaaacttagcaatatataacagttnggtaacaggatttttgactattcactttgggagttatttttaaaaatccacttttttactgagtcttactacataccaggcactgtacttgg

SEQ ID NO: 509 - DNA, 422 bp, Homo sapien
  misc_feature (1)...(422): n = A,T,C or G
ntgggaagtcgtgacatccatgggaacccagcgctgtgatgctggtgtttgngttctccgcgagaagtgaccattgttggagcaccatccagagctagtgaccantncagtggacagttagtgggagaatcaaaaatcctttccagaatgtctgtttctcactacntgcaccgggngattacaggcaccagtgcagngatgattgtacttatttgacacatactccccgtcntcctggntnttgttcctganaanggtgggtaaatattccaggaaaaanaatgcacattgaatggatgtgagagaccacattgcctctcccactgctttggggagcactttcctgtcatttctaacttaccacntgcttggtgtactatatgtatgttgtgcctcatatgttgcaaagaactaangtgagt

SEQ ID NO: 510 - DNA, 238 bp, Homo sapien
ccacctatgaattggtggtttacctactcaatggatagcagcacgaggactgctgtactgcacaaaaagaagaccaaaagattacagtggaccatgggatacagaagccagcatggcagacagaagaaaaatagtttgggaacatgtaactatcctaagtggaagttttgttgtaggaattatagtaatcacaccacattacttggcctttcggtaatgtgaaaaaaaaaaaaaatcc

SEQ ID NO: 511 - DNA, 254 bp, Homo sapien
  misc_feature (1)...(254): n = A,T,C or G
ccnattgatttgatggtaagggagggatcgttgnggctcgtctgttatgtaaaggatgcgtacggatgggagggcgatgaggactaggatgatggcgggcaggatagttcagacggtttctatttcctgagcgtctgagatgttagtattagttagttttgttgtaagngttaggaaaagggcatacaggactaggaagcacgataaggaaaatgactatgagggcgngatcatgaaaggtgataagctcttct

SEQ ID NO: 512 - DNA, 269 bp, Homo sapien
  misc_feature (1)...(269): n = A,T,C or G
cctacctgtaaactacagtactttatatatctatgggnttaataaaaanaaaatccacaaatcttaaaaaggaactttaaatgcagggctatattgaattggnaaactgcaacacaaactggcgcaacataggtaaatgaataccaatctcactctatgtgatgcaagcatgctactttcccactaatttaaattactttcaaccactatgagccagaatgcatgcctgaaccttaaactgcactttaaaaagtaacatcttggcctaa

SEQ ID NO: 513 - DNA, 266 bp, Homo sapien
  misc_feature (1)...(266): n = A,T,C or G
ggaggggggttgttagggggtcggaggagaaggntggggaacagctaaataggttgttgttgatttggttaaaaaatantagggggatgatgctaataattaggctgtgggtggttgtgttgattcaaattatgtgntttttggagagncatgncantggtagtaatataattgttgagacgattagttttagcattggagtaggtttaggttatgnaccgtactctaggccatatgtgttgganattganactagtagggctagg

SEQ ID NO: 514 - DNA, 271 bp, Homo sapien
  misc_feature (1)...(271): n = A,T,C or G
acatgcaanaaatcgagaatcttaaaaaacannacgaanctgccctggaanncttactggnntangatatttatnttgcggctgagatacttgaacaacttcggatcngaantagacaanaangggnanttntatactgcnncagaggttacacagntcattgtattagagangaacanatgggtctggtgttcacacattggggggaanatgggcgtnnacangagaggnnganaaacnanganagcctncctggttngcataanaaaaa

SEQ ID NO: 515 - DNA, 328 bp, Homo sapien
  misc_feature (1)...(328): n = A,T,C or G
ccaatgaggggcaaagtgagcgncnagaagangttttgactgaaataaatcaaacacaaaaatntaagttcacagtgacagtttaaacaaaatccaaacaaactaacaacanaaacaccccttgntttgcctctagtggaaggtggganaacacaanctcgtcctaaaaattgactagtaaaggggaaaacccggtcatttncctactctttccangaaatatctaatgcaagaaagaacttctnctcattatacngaaggaatttngaaaaatgatgtatttttggaacacctaantgaaatactggaacctgggcaagttcaccac

SEQ ID NO: 516 - DNA, 220 bp, Homo sapien
  misc_feature (1)...(220): n = A,T,C or G
ncctnagttgaaggaccccatgtacatacaggccaggggagcagtactaggntaactagaaggatctcatccccatatgtgggctcatttcaagtctatggatgactaccttcattgntgtgtgcgagatggtttcaccccttgaaaatatgggcacttcancataanatagcnaaatctttataatgatcaatncatcctacctccttttacatgcatg

SEQ ID NO: 517 - DNA, 296 bp, Homo sapien
tgcgatttcttccttgttgtttgctttggtctgtgttcaatccagagagcttaaattgtcattattttgggaagaaaacctgtatttttgttagtttacaatattatgaaatttcacttcaggagaaactgctgggcttcctgtggctttgttttcttagtttctttttccgtgccgtgtattttttaattgatttttcttcttttacttgaaaagaaagtgttttattttcaaatctggtccatatttacattctagttcagagccaagccttaaactgtacagaatttccactg

SEQ ID NO: 518 - DNA, 299 bp, Homo sapien
  misc_feature (1)...(299): n = A,T,C or G
gaagatagaaaaatataaagccaaaaattggataanatagcactgaaaaaatgaggaaattattggtaaccaatttattttaaaagcccgtcaatttaatttctggtggtgcagaagttagaaggtaaagcttgagaagatgagggtgtttacgtagaccagaaccaatttagaagaatacttgaagctagaaggggaagttggttaaaaatcacatcaaaaagctactaaaaggactggtgtaatttaaaaaaaactaaggcagaaggcttttggaagagttagaagaatttggaagg

SEQ ID NO: 519 - DNA, 464 bp, Homo sapien
  misc_feature (1)...(464): n = A,T,C or G
gctgcacatcggaggaaaactcggtaaagcagaatgaggttgatatgttgaatgtatttgattttgaaaaggctgggaattcagaaccaaatgaattaaaaaatgaaagtgaagtaacaattcagcaggaacgtcaacaataccaaaaggctttggatatgttattgtcggcaccaaaggatgagaacgagatattcccttcaccaactgaatttttcatgcctatttataaatcaaagcattcagaaggggttataattcaacaggtgaatgatgaaacaaatcttgaaacttcaactttggatgaaaatcatccaggtatttcatacagtttaacagatcgggaaacttctgtgaatgtcattgaaggtgatagtgaccctgaaaaggttgagatttcaaatggattatgtggtcttaacacatcaccctcccaatctgttcagttctccagngtcaaaggc

SEQ ID NO: 520 - DNA, 221 bp, Homo sapien
ctgatatctacttatttaacacaagtctctaatacaatacaattttattaattttattccacatgccccacattagatctctagactcattcatcctacatacctactttgtatcctttgacctacatctccctacttcctcctccagtccccaccccccacccactggtgctaaccactgtttcattccctttttcattctacatatgtgagatcatgct

SEQ ID NO: 521 - DNA, 312 bp, Homo sapien
  misc_feature (1)...(312): n = A,T,C or G
ctgatagctttctcttcgcctagattaatatcttctnncttcccattcacagcccccaccgacatcaaagctttgctgttttatctgtcaaaaatgtcttcacacttttcattcttaaataaaagtgctgagtaaggacattttcacaacaaatttttattttacaaaacttacaatgatttgaatccaaaacaactttcattatttaactgtaaagtaaatatatattttattaggngtgtcttagttcattttgtgctgctttaacagtgtatccttgtgatagttgtggggtgggggaggggggaagga

SEQ ID NO: 522 - DNA, 336 bp, Homo sapien
ccttctttccccactcaattcttcctgccctgttattaattaagatatcttcagcttgtagtcagacccaatcagaatcacagaaaaatcctgcctaaggcaaagaaatataagacaagactatgatatcaatgaatgtgggttaagtaatagatttccagctaaattggtctaaaaaagaatattaagtgtggacagacctatttcaaaggagcttaattgatctcacttgttttagttctgatccagggagatcacccctctaattatttctgaacttggttaataaaagtttataagatttttatgaagcagccactgtatgatatttttaag

SEQ ID NO: 523 - DNA, 172 bp, Homo sapien
  misc_feature (1)...(172): n = A,T,C or G
ngacnggcncntggctatgtntatagatagggctttaaccactatctgngaagcangagngacannattcttgctctcacatnccacngganacgtatttctcttctcttacnagcgaagaaccatctntttctaaagcccccattctattgcccttgcttttctctggctt

SEQ ID NO: 524 - DNA, 471 bp, Homo sapien
ccagacctgcagaaaaacttagcacagctcaatctgctgttttgatggctacagggtttatttggtcaagatactcacttgtaactattccaaaaaattggagtctgtttgctgttaatttctttgtgggggcagcaggagcctctcagctttttcgtatttggagatataaccaagaactaaaagctaaagcacacaaataaaagagttcctgatcacctgaacaatctagatgtggacaaaaccattgggacctagtttattatttggttattgataaagcaaagctaactgtgtgtttagaaggcactgtaactggtagctagttcttgattcaataagaaaaatgcagcaaacttttaataacagtctctctacatgacttaaggaacttatctatggatattagtaacatttttctaccatttgtccgtaataaaccatacttgctcaaaaaaaaaaaaaaccttc

SEQ ID NO: 525 - DNA, 332 bp, Homo sapien
  misc_feature (1)...(332): n = A,T,C or G
ccccnctgtattccagcctgggtgaccccatctcanggaagaaaagttaccagatgtcgngggtaaaggttggtcttcaagtggcctcataagttgtcttgcatttaaattcagggaattcattggaccaataggttacattttcgttccttttttgttttggttcatctgttaagcagtgggggcctaattactgctcctttgtaaaaacacattttcccaaagaacactgaattaccgttcaaactggttgttgatgggtaataagggctgtttttgctgccccaaaagggcttaacaatttaggcggatagtttacttaaaaaaaaaaa

SEQ ID NO: 526 - DNA, 440 bp, Homo sapien
  misc_feature (1)...(440): n = A,T,C or G
ccaggttacctcccctaacagatgtggtgttctgangggttggttaagtgcccgaggaaaataggccttaactgttaacatctacagagaagaaagcatggtcacactggcaaggagtaagaagggattgggtaaaagaaaatgggagagaaaagggaaaaaagttttggcaagacaattgttccctgctaagaagctgcagggtgaaagctttcctttcttctatttttgtttttaatgnctgtctctctgatcagnggaaaagtgaaaatttctagtatctagcactaacgtatgacccaactttgagggatcacaagctagaacaagttgaggatttaaaatcctggataattatatacttaaagttcatgagcataaagctcacttgaccatgcagaaatgctgggaagcagggtgcatggcatgggaatacatct

SEQ ID NO: 527 - DNA, 124 bp, Homo sapien
  misc_feature (1)...(124): n = A,T,C or G
tttccatatgtctgttgggtgcataaatgncttcttctgagaagtgtctgttcctatcctttgccccctttttgaggacttaaatgttagacctaagaccataaaaaccctagaagaaaaccta

SEQ ID NO: 528 - DNA, 162 bp, Homo sapien
  misc_feature (1)...(162): n = A,T,C or G
ctgcgggagaaatatggggacaagatgttgcgcangcagaaaggtgacccacaagtctatgaagaacttttcagttactcctgccccaagttcctgtcgcctgtagtgcccaactatgataatgtgcaccccaactaccacaaagagcccttcctgcagcag

SEQ ID NO: 529 - DNA, 409 bp, Homo sapien
  misc_feature (1)...(409): n = A,T,C or G
cctttaaaatatagcttataaaatgtatactatnngccaggagagctcacatttttctgcagttttccagtggacctgcctatggaatactgtaaagaaaaatctgcaaaaatattcctagcaattgaatcagtgcttttaaataaaagaagtggagaggggcttggttaaattattctgacaagttttcttgctagtggttgccaaaattaaggatatttgaagtgtcctatcacccaaatttggctttaagaaaaagctatattctgngtctatagggtgaagcccacactatctgtgctgcattctcaatgatacaatacctatctggaaactttcctgttttgccaatgggtgcacaaatctaaaacattttatcacaaaaggtacttgaatttaaatttctttt

SEQ ID NO: 530 - DNA, 325 bp, Homo sapien
  misc_feature (1)...(325): n = A,T,C or G
ccgccagtgtgatggatatctgcagaattcgccctttcnagatttgngcccgggcaggtccatggctaggattatagatagttgggtggttggggnaaatgagtgaggcaggagtccgaggaggttagttgtggcaataaaaatgattaaggatactagtataagagatcaggttcgtcctttagtgttgtgtatggctatcatttgttttgaggttagtttgattagtcattgttgggtggtaattagtcggntgttgatganatatttggaggtggggatcaatagagggggaaatagaatgatcagtactgcggcgggtagg

SEQ ID NO: 531 - DNA, 173 bp, Homo sapien
  misc_feature (1)...(173): n = A,T,C or G
ccaattgatttgatggtaagggagggatcgttgaccncgtctgttatgtaaaggatgcgtagggatgggagggcgatgaggactaggatgatggcgggcaggatagttcagacggtttctatttcctgagcgtctgagatgttagtattagttagttttgttgtgagtgttag

SEQ ID NO: 532 - DNA, 395 bp, Homo sapien
  misc_feature (1)...(395): n = A,T,C or G
caggtcctactatgggtgttaaattttttactctctctacngggttttttcctagtgtccaaagagctgttcctctttggactaacagttaaatttacaaggggatttagagggttctgtgggcaaatttaaagttgaactaagattctatcttggacaaccagctatcaccaggctcggtaggtttgtcgcctctacctataaatcttcccactattttgctacatagacgggtgtgctcttttagctgttcttaggtagctcgtctggtttcgggggtcttagctttggctctccttgcaaagttatttctagttaattcattatgcanaaggtataggggntagtccttgctatattatgcttggntataatttttcatctttcccttgcgg

SEQ ID NO: 533 - DNA, 290 bp, Homo sapien
  misc_feature (1)...(290): n = A,T,C or G
ctgaaccattatgggataaactggtgcaaattctttgccttctctacttctcactgattgaacataagcttccagggctcccctgaaaaccaaaatgaaaacaatgtcaaaatattagataaatcacataaaacagttaaggggataccaatatataaaaattattaggtaagctcatttctggaactgttaatgctcggtttcacaatccaagnngaccaacagccttcactcagntactggnagtgntactatggttactacngntactacctttagtgtnaaaaact

SEQ ID NO: 534 - DNA, 334 bp, Homo sapien
  misc_feature (1)...(334): n = A,T,C or G
ccgccagtgtgatggatatctgcagaattcgcccttagcgagnnagccgggcaggtccatggctaggtttatagatagttgggtggttggtggggnatgagtgaggcaggagtccgaggaggttantttgtggcaataaaaatgattaaggatactagtataagagatcaggttcgtcctttagtgttgcgtatggctatcatttgttttgagggtagnttgattagncattgttgggnggtaattantcggctgttgatganatatttggaggtggggatcaatanagggggaaatanaatgatcagtnctgcggcnggtnngacctcngccc

SEQ ID NO: 535 - DNA, 557 bp, Homo sapien
  misc_feature (1)...(557): n = A,T,C or G
nccataagcttcagtgcgcaaaaggtcaaggccagtgttaatttgttatttcttaaataactttccctttcatttttaaattataaatttaacttctaacatgttttatggttaaaattgtacttttttcctttagcgacattcaaatgcatcacaatcactttgtgaaattgttcgcctgagcagagaccagatgttacaaattcagaacagtacagagcccgaccccctgcttgccactctagaaaagtatgtgtaaaactctgttcttgttcttctttcatattgatgctgttccatgtgttaccattgtgagtggttggtaagtgttccttatgtgggaatcatgtgccttgaaaataaccttgggtgggtgagaaggtagggaaacctgcttcttttatctcaagtaaaagttttggcagggtaaagaagataaatgacatttatatctagacttttgagttttccaattatttggtaaaaatgggaaattctgtagaagcccttccttaaaaatgggggaagtccatttnanaaaattaactggtaggtca

SEQ ID NO: 536 - DNA, 372 bp, Homo sapien
  misc_feature (1)...(372): n = A,T,C or G
gttccaaccttcatttctgaaactgttctagagcacngtgtctttctcgtagttcataacttaccccttcagtctagaattagaattacattatctgttttactactttactagactgtaagctcctagaagataaggactagggagttcatctctgtattccaccagaaggtacagtgactcatatctagagtctttagatgaaacttactgagttgaataacttaatatatttctgttttcattcccaagggaggccatgtctggagatagaccttgaatttaataaattttaggcactataccatttcagtggagaaaattgttgggaaatttggggggatggatatataagggggaggaagtcactgg

SEQ ID NO: 537 - DNA, 284 bp, Homo sapien
  misc_feature (1)...(284): n = A,T,C or G
ccttctgatgcaaacagaaaggaaatgttgtttggangccttgctagacctggacatcctatgggaaaatttttttggggaaatgctgagacgctcaagcatgagccaagaaagaataatattgatacacatgctagattgagagaattctggatgcgttactactcttctcattacatgactttagtggttcaatccaaagaaacactggatactttggaaaagtgggtgactgaaatcttctctcagataccaaacaatgggttacccagaccaaactttgg

SEQ ID NO: 538 - DNA, 293 bp, Homo sapien
gtacatagtaggtgtatatatttatgggctatataagatgttttgatacaggcatgtaatgtgaaacaagcacatcaacaagaatggggtatccatcccctaaaacatttgtcctttgggctacatgtcatttcctaatgtaaagaaaatggacagacagaaccaacattgatttgactgggtgaaaaagtccatttgagttgggagcaggggttgtgttcctggatttgggttgttaggacagtgtaaaaaggcttcacaggggaacattcttttctgataaaggaaagcag

SEQ ID NO: 539 - DNA, 468 bp, Homo sapien
  misc_feature (1)...(468): n = A,T,C or G
tttcnataaactttatttttagagcagttttaagnnggtagcaaaattgattagaaggnacagagatgtcccatacacctcctactcccacacatgcacagccttccccattatcaatagcccccaacagagggatacatttgttaacaactgacgaacctacatatcattatcacccaaagtccacagtttatattattccttctggagaattttcaaatacagaaattcctctaccaggaataaactancaatttcctctcggctttctataaatttaattattatttcagaaattagcctatctttacaggagaaaatgttataaaccatgaaaagactatcaaatacacaaggaagtgaatgntatataaaaaatgtaccatctcctaaacaactacctgcattcccttcttgttggtaagttataatttgnnatagttctgatcatctgtttaattaatttgc

SEQ ID NO: 540 - DNA, 397 bp, Homo sapien
  misc_feature (1)...(397): n = A,T,C or G
ctgttttattaattcccccatttgcagcacacttntctcttccaacattcatcagtcagatcagagtccacggtcttttcaaaatttagataaactggcttacattttgtaatgatgtccccagacaacaccccactccaacccattctgtttgttactattagtttacaacatgcatgtgcctttactttcattttcatagtatttaaaaatggaagggcactcccaaatttactttaacccctttaataatctctctcctcctgctctctctggtcctccagacaactgttgatttactttcctttatgatggattagtttgcattttctagaattttatatgactgacatataaagnttttatgtttctcccctttgggtttcttcatgtggca

SEQ ID NO: 541 - DNA, 248 bp, Homo sapien
cctagataggggattgtgcggtgtgtgatgctagggtagaatccgagtatgttggagaaataaaatgtgcatagtgggggttttattttaagtttgttggttaggtagttgaggtctagggctgttagaagtcctaggaaagtgacagcgagggctgtgagttttaggtggagggggattgttgtttggaagggggatgcgggggaaatgttgttagcaatgagaaatcctgcgaataggcttccggc

SEQ ID NO: 542 - DNA, 366 bp, Homo sapien
  misc_feature (1)...(366): n = A,T,C or G
aatcggccctctagatgcatgctcgagcggccgccagtgtgatggatatctgcagaattcgcccttgagcgatancgcgggcaggtccaattgatttgatggtaagggagggatcgttgaccncgtctgttatgtaaaggatgcgtagggatgggagggcgatgaggactaggatgatggcgggcaggatagttcagacggtttctatttcctgagcgtctgagatgttagtattagttagttttgttgtgagtgttaggaaaagggcatacaggactaggaagcagataaggaaaatgactatgagggcgtgatcatgaaaggtgataagctcttctatgataggggaagtagcgtcttgtanac

SEQ ID NO: 543 - DNA, 460 bp, Homo sapien
cctactatgggtgttaaattttttactctctctacaaggttttttcctagtgtccaaagagctgttcctctttggactaacagttaaatttacaaggggatttagagggttctgtgggcaaatttaaagttgaactaagattctatcttgggcaaccagctatcaccaggctcggtaggtttgtcgcctctacctataaatcttcccactattttgctacatagacgggtgtgctcttttagctgttcttaggtagctcgtctggtttcgggggtcttagctttggctctccttgcaaagttatttctagttaattcattatgcagaaggtataggggttagtccttgctatattatgcttggttataatttttcatctttcccttgcggtactatatctattgcgccaggtttcaatttctatcgcctatactttatttgggtaaatggtttggctaag

SEQ ID NO: 544 - DNA, 116 bp, Homo sapien
  misc_feature (1)...(116): n = A,T,C or G
ccgccagtgtgatggatatctgcagaattcgccctttggagngctngcgcccgggcaggtctgtttcagcagctcctccttcttcttcccgcgangatctcgagccttgatcttgg

SEQ ID NO: 545 - DNA, 380 bp, Homo sapien
  misc_feature (1)...(380): n = A,T,C or G
cgacggatcgatnagctngatatcgaattcggacgagcatggcgtattgctgcagatatggattcttcagaatgctccatgacaaatgtactgacgggaagncnatctaaaggaggcattgtnatgagagaaaggtctcgagctccagataaagagagatacagagttcttggaattggagttgcagaaacagtaagacaatcgattgtggggaagcgttcttttagagaatctttggccttcactccaaagcgttgttcttcatcaataataagtagctcgtgccgaattcctgcagcccgggggatccactagttctagagcggccgccaccgcggaggagctccagcttttgttccctttagtgagggttaatttcg

SEQ ID NO: 546 - DNA, 418 bp, Homo sapien
ccagggcaattaggcaggagaaggaaataaagggtattcaattaggaaaagaggaagtcaaattgtccctgtttgcggatgacatgattgtatatctagaaaaccccattgtctcagcccaaaatctccttaagctgataagcaacttcagcaaagtttcaggatacaaaatcaatgtacaaaaatcacaagcattcttatacaccaataacagaccaacagagagccaaattatgagtgaactcccattcacaattgcttcagagaataaaatacctgggaatccaacttacaagggatgtgaaggacctcttcaaggagaactacaaaccactgctcaaggaaataaaagaggatacaaacaaatggaagaacattccatgctcatgggtaggaagaatcaatatcatgaaaatgg

SEQ ID NO: 547 - DNA, 172 bp, Homo sapien
cctgaggttgggagaaattttgtccatttctttagaaccaaaattggcaaccagagagtatttggatgttacacaaaatatctagtttccctttctagcctaaattgggttgtttatagcacccgtctctccatttgagaaaaatggttaggatgctggtgcagggatgagg

SEQ ID NO: 548 - DNA, 367 bp, Homo sapien
  misc_feature (1)...(367): n = A,T,C or G
ggtctgacttaagagaaacaatggaaggcaagaggcagtagaataatatattcaaaagatgcaaaggaaaaaaacctctcagccacgaattccttatccagcaattatttttcaaaaatgaaaataacacaaagacttagccagataaacagaaacattaactgaagttgttgctggcagacctaccatataaaaataaaaaactctaaaaaaattcctatggctaaaagcaagttacagaagacagtcacttgaatccacattttaaaaaaagcactgatatacgtaatattgacattataaaagacagtaaaaatgcatttcttctttataataaatngcttattaaataacatgtgtataatgg

SEQ ID NO: 549 - DNA, 418 bp, Homo sapien
ccaaatcagaacctagagtgagcattctataaactcacctttgctttgatccttgaagatcacaagttttgatactgttgaaatctctactctttcaacactttaattaaatggcatttagaatttcatatacttctgttgttgtttccacaatcttaaactggatttagaaatacttataatgtaaatgcaagagctttaacttagtaaccgtatttcctattttttgttgtttttcttttgccagaatttctgtttgtctacaataaagtccagcgaaatacagtatttggttaggttacttgttaacataaaattttatcatttgtagagtttttacttaaccttcctattctctagtctctataatctttcaatgaagataaccagttacgaatatctcctataccatattagg

SEQ ID NO: 550 - DNA, 234 bp, Homo sapien
  misc_feature (1)...(234): n = A,T,C or G
cctacccgccgcagnactgatcattctatttccccctctattgatccccacctccaaatatctcatcaacaaccgactaattaccacccaacactcacaacaaaactaactaatactaacatctcagacgctcaggaaatagaaaccgtctgaactatcctgcccgccatcatcctagtcctcatcgccctcccatccctacgcatcctttacataacagacgaggtcaacgat

SEQ ID NO: 551 - DNA, 542 bp, Homo sapien
  misc_feature (1)...(542): n = A,T,C or G
cacccctaccccnntcctcataaaagttnctctccctggatcctctttttccctcatgagtgcccggttgcccaagtcaaaaacctgggagtgatataaactccccacacatccagtcagtcactcatcaactctattgattctgtctgctaaatatatntcaattgtattaacttaaacatatgcatanggcactttcttcttcactgcatttttgtgggctgcacttacctttcaggtaacgacaacactggcccctcttgcccttctagtcagaagtgccaaaatgatgagagctagccatgacaaacccacagccaacattacactgaatgtgcaaaactggaagggcatccaaacagaggaggggagagaggaatagacaggaagtcaaactgtctctgtttacagatgacatgtttctatatctataaagccccatagtcttggccccaaagcttcttctgctgataaactttagcaaagtcttagcatacaaaatcaatgtgcaaaaattactaacagtcctatacatcaagtca

SEQ ID NO: 552 - DNA, 411 bp, Homo sapien
  misc_feature (1)...(411): n = A,T,C or G
cctggntgacaaggaggtgcctgtnatgtgaagatttgaggaaagagcattccaggcagggggaaggcttgatgcaaagggtctactgcaggcattagctgagcttatttaaagatcagaatgaaggccattgtggctagaacagagtggacaggaaggaatggtaccaggcaaagctgaagaagttggcaggattgagctctcataantcatggcaaagagttcccatttcattgtttgacggaaataaattggaaggtcttaagtaggagaagatttgattagatttacattttacgaagaagcactctggatgttatgtgaagaaatggcctttgcagggcaagggtggaaacaaagagatcagttaggaaattattggagtagctgaggattggatgaggggatgtg

SEQ ID NO: 553 - DNA, 631 bp, Homo sapien
  misc_feature (1)...(631): n = A,T,C or G
ccgggattagaactaaaacaagtgagatcacccctctaattatttctgaacttggttaataaaagtttataagatttttatgaagcagccactgtatgatattttaagcaaatatgttatttaaaatattgatccttcccttggaccaccttcatgttagttgggtattataaataagagatacaaccatgaatatattatgtttatacaaaatcaatctgaacacaattcataaagatttctcttttataccttcctcactggccccctccacctgcccatagtcaccaaattctgttttaaatcaatgacctaagatcaacaatgaagtattttataaatgtatttatgctgctagactgtgggtcaaatgtttccattttcaaattatttanaattcttatgagtttaaaatttgtaaatttctaaatccaatcatgtaaaatgaaactgttgctccattggagtagtctcccacctaaatatcaagatggctatatgctaaaaagagaaaatatggtcaagtctaaaatggctaattgtcctatgatgctattatcatagactaacgacntttatcttcaaaacaccaaattgtctttagaaaaattaatgtgattacaggtagagg

SEQ ID NO: 554 - DNA, 558 bp, Homo sapien
  misc_feature (1)...(558): n = A,T,C or G
ccaggntagtctccaactcctgaccttagctgatccacccacctcggcctcccaaagtgctgggattacaggcatgagccactgcgcccggccaaacttgatatgcatttttaaataagttaatacattattcatggtttagtctcattatatattctatggtccactttgaaatttcatctaaccaaaatcatcttcatcctgcaatttgaggtttggacacaatggggattgatcagtaatttcttcatatgccctttctcaaggaaatagtttcctatgaaaaaaaagtcctatgttttcatgtaagttctctttttggagaagaaaaggagacattcttacttagcactctcagttttacaaaacgctgccaaccttaaaatttgtctattgattcccaaggcacacaaccaatagtctgtcaataacccggaataacatttctttaaggccccagtaactttcacatgtttgggttccaatcctcacctagaatcttgttaagaaaagtaaaccattcactcctctagaaactctaaggttgcttcttagggg

SEQ ID NO: 555 - DNA, 212 bp, Homo sapien
ccaggtatttgcataatggcttttcttctgttgcctttgttcctttgtggccccagctaattgcctgagagtgccactgttagttttcaactctttctgatagaaaccctgtgtactaacatggaaatcttaggtaatctgctttttcaaagcacaatgcagaatttattggcggtggtgtaactttaagaatatccgagaagccaccaagg

SEQ ID NO: 556 - DNA, 219 bp, Homo sapien
  misc_feature (1)...(219): n = A,T,C or G
ccatgtgtctatctggagagaaggggaaacagcaagtgcaaaggccctgagatggaacatatctggagaattcgaagaatggtaagaaggccagagtggagcagaacaagtgtgggagagagttgtaggagatgagatcaaaggctaggaatgaagtgtaaggccatgtcatgtgaccttgtatgtccttgtaaggcttttttttttttttttnancct

SEQ ID NO: 557 - DNA, 482 bp, Homo sapien
cctactatgggtgttaaattttttactctctctacaaggttttttcctagtgtccaaagagctgttcctctttggactaacagttaaatttacaaggggatttagagggttctgtgggcaaatttaaagttgaactaagattctatcttggacaaccagctatcaccaggctcggtaggtttgtcgcctctacctataaatcttcccactattttgctacatagacgggtgtgctcttttagctgttcttaggtagctcgtctggtttcgggggtcttagctttggctctccttgcaaagttatttctagttaattcattatgcagaaggtataggggttagtccttgctatattatgcttggttataatttttcatctttcccttgcggtactatatctattgcgccaggtttcaatttccatcgcctatactttatttgggtaaatggtttggctaaggttgtctggtagtaaggtggag

SEQ ID NO: 558 - DNA, 679 bp, Homo sapien
  misc_feature (1)...(679): n = A,T,C or G
ctgtnaaaattctgaacctatccccaaaagaaaaaccgtgaaatacaagttttaggaggtggagcaaagaaaagccaagttatttaaaaccaataaacacaagagacaattctgctggagaatttactttctccaaaacatcaaatggactttaaagcagaagaccacattttatgagaaagttatgtcactgaaaagcttcatgtaaagtgactttgtaaatggaatatttttaaatgataaaaagaaaataacttttccaggaatcctttggagaggctgataaccagatattaaattatcaattttgccaaagtggacttttaaaaaatgtgttacttttaaaaactaacttgaaagaatttatgaggcaatctatctgagtatgtttattgttgctccattggctttcaggattttggtcatttcactgttaactcttacatcagagaataaagaaaagaaaatgaaactttgttaggaactgggatggaaaatgtagtcccagacagatctactgacctcgactgagtttcagaaatatcccaggattttggttattcatgcctttcttttgtgactttctttcaaattagccaattaaagataccccttcaatcaccggtgacatcagtacaacagtttttcaacagttttctctctcctgaccaaacagttt

SEQ ID NO: 559 - DNA, 488 bp, Homo sapien
  misc_feature (1)...(488): n = A,T,C or G
ccccactgtactccagcctgggtgaccccatctcaaagaagaaaagttaccagatgtcatgggtaaaggttggtcttcaagtggcctcataagttgtcttgcatttaaattcagggaattcattggaccaataggttacattttcgttccttttttgttttggttcatctgttaagcagtgggggcctaattactgctcctttgtaaaaacacattttcccaaagaacactgaattaccgttcaaactggttgttgatgggtaacaagggctgtttttgctgccccaaaagggcttaacaatttaggcggatagtttacttaaaaaaaaaaatcctttggagacatactgaaaatgcaaactagtttctaaattatcaattccctacatgaanaagcagtttgccanagtttagtctcanaaaatgactggttggctctatttaaatcanaacccaatttctacgcacctgcccgcccggccaagggc

SEQ ID NO: 560 - DNA, 602 bp, Homo sapien
  misc_feature (1)...(602): n = A,T,C or G
cctanttaagaattccttgccttagtggtgaacaaggactaaacacagacaatgggtgaaacacagacgctaattcacataacagagagtaggcaaccttaagaatgaattgatgcagactcctatagaattcctctgttatgactgggttcttattttctcctccttgtatgtagttgaaatttcatcattatgaatagttccttggatctttttttaaagttgtgaatgcgagtgtttggctttgtaatacaactttttagtatccagaagataaccagtgctctaccaataaagatcttttgatacaaagggttttaacttctgccagttcttactcatttttttcaggttttttatacatttcttaaacaacacatacattatgtaaaatataagaattaatgtacattctcaaggccagattcagtgacaaaatgcactacccgaatctagtaacacatttactccttgctgcatataagtggcgtgtaagaaatacagggtatattgttttgtgatccatgcagtaaatgttcacaaatatcaggcaaacaactagacgntcttcagctactaaaattaactgtcccagtcacaaa

SEQ ID NO: 561 - DNA, 683 bp, Homo sapien
gtctatttttaaaaagaaagaaaaaaaccacttttttatagtccctagctttgccatatgcccgccttaagtggaaggaaagttaatcacttaactatgttttataaaaagaaaaaagggcttggaatgctattactgttcacacaaagtatgattctgtttgaataaggcaaatgctcctttttttaaaaaaagacattactgtaatatcaaaaaccgtggcagtttgtatacaactctgggcttgattttttttaaaaaaacagaatgaattgatgtcttattttataaatgttctatatttattaggagaaaactttatattgccttttttatcaatcatgtaacaggcttatagctttccaacagagctgcttgccaaacaattttttttgtttattaaacagtgctgaaacaaacaggatcagcatttacttaagatgttaagaatgaggacttttaatcagccgaaccaagatattgttacctgtatgcattcccaaagtctagatgctcagtatgttcagtcatatctttcagaatcagtgaaccgattaccctttttttggtattcactctacatctgccaacctagttcaccttggttttgtgtctgctgtagaagggaaccataacttggttaaaccgtagggattatcattgtatacatgctgtgaacatgt

SEQ ID NO: 562 - DNA, 420 bp, Homo sapien
gcactttttttccagtaaggattcatctcttgctctcctatatggtcattatattttatattttacatatttataaacatgacatatgtatttatgttccacaaagggctttgaatagaatttacacatagagttccctgggttgatgtgtttatcaaaatggaagataaagtgaattaattacttaaatatttaacactattgaatagaaataatttccccaatattgcttcatgatttagacagtctattaaatgtttaagcaaggcactagactaagtttattaagacaaattttggaatatgtgcagaaatatgacctggctaatagtacagagtcaaagctggttgaatggtgttatatagtggattcagattgatgtggcagtggtggttacactaggggcactaaggttatcc

SEQ ID NO: 563 - DNA, 482 bp, Homo sapien
ctccaccttactaccagacaaccttagccaaaccatttacccaaataaagtataggcgatagaaattgaaacctggcgcaatagatatagtaccgcaagggaaagatgaaaaattataaccaagcataatatagcaaggactaacccctataccttctgcataatgaattaactagaaataactttgcaaggagagccaaagctaagacccccgaaaccagacgagctacctaagaacagctaaaagagcacacccgtctatgtagcaaaatagtgggaagatttataggtagaggcgacaaacctaccgggcctggtgatagctggttgtccaagatagaatcttagttcaactttaactttgcccacagaaccctctaaatccccttgtaaatttaactgttagtccaaagaggaacagctctttggacactaggaaaaaaccttgtagagagagtaaaaaatttaacacccatagtagg

SEQ ID NO: 564 - DNA, 302 bp, Homo sapien
ctggaagtgaaggtactaatatacaaatggctcttgtttctgaatatgtgatataatttgtgaatctttggaaactgaattttttctatggagtgcaaatatagaagggttattttacaatgtttgttgtgaaaagaattcactttgtaaacaactattaaggctggaagtttagtgaaggtgcatagttttgaaagctacacaggtgaaaaatcaaacttattgtttgtaattttgctgttacatgttaagttactttgacagcaattttctaatgataatgtgatttatgatttaaaagg

SEQ ID NO: 565 - DNA, 554 bp, Homo sapien
  misc_feature (1)...(554): n = A,T,C or G
ccanngtgacatcatggcaatacagcaagaattctgnnatttatttagaagcctcaaggagaaggatcctggagcccctgaatgagagtttcttctccatgcctctccccagtcaaaatacatggaaatattcatagaagcattgtacccagcatgataaggaaggatggagaatggttccttatatctctgttcacaagacatcaacactcttaagtaactgtatgaaataaattctctgctgaaagcaaataaaccatctgaaaggtcttctggttacttacacagatttcctagagaatctgaaatcagcctaacagggaagattaatttttaaatgaatccaagttaatgaaagcaaagaactcttatacagaaatacattttcctattataaagcaggactaccttccctaatttctgatagacctaggacaatttgaatgggcattgaaattcttttggttgaattacgcaaacaagcaaaggaaaagtctcaattattattggaaaatttggggagagattattatctcttgatctcctagtnnatt

SEQ ID NO: 566 - DNA, 631 bp, Homo sapien
  misc_feature (1)...(631): n = A,T,C or G
ncgaagctgtgaanncattcacacggaatctgganggtattactgtaacttcttataatacataatataaaagtttttgaaagatatagacacaattaacccctaaacaacacactatctgattctcaaaagcaatggctatttaacaagatgtaaaaggacaataacatatcaaagaactttcacacacctaaagatagcatttagcagcaagttagtcagacaaaacaaacataaatatcttcacatttcctatgtttgtttttaactttacttcataaagccactgataattgaggtttctttcaagtataagatttctaaaattaaaaactgtttttgacatatttttataaagaaataaaaagcaaaacgcaatccaactatttatatgagtccctcttctccaacagctttagatgtttttctgagtactttttacacagaatatttttattaaaatcagttctaattcatttatgcagattaggggaaaatgattcataataaattaactttaaaattaccttctatctgcttctacctctatccccccatcaccaccaaatctgttgctacagtgaactgtagccaatgtctgtttgagggggcccaaagcatctggtaatct

SEQ ID NO: 567 - DNA, 510 bp, Homo sapien
  misc_feature (1)...(510): n = A,T,C or G
cctatnatagcttctctagctatcatactccaatcagcnaaaaatgagaaaatgttgagaaatagaagataattcctcatttaaggncaccttctanaatttgtgcttaanantctgttttcttctcatgggccagcacttcggcaactgggaaaaattangngtacagggatctaggnaatactgtttatttgagcaataatatattgngctaacgttcaggcatcctattactgagaaataagggaaaatgagtgtaaagtacaactaagagtctcggctacagggaaaaataccatcagttaaatatccatagtcctagagcatttatgtaaaactgcaatttgaatcctgcaatacattttggctttttcctcagtgataccatgtgtgggaagttgttctgtcaaggtgggtcggataatttgccctggaaaggacggatagtgactttcctgacatgtaaaacatttgatcctgaagacacaagtcaagaaataggcatggtgg

SEQ ID NO: 568 - DNA, 180 bp, Homo sapien
  misc_feature (1)...(180): n = A,T,C or G
ttaatntgacncacgcttatgcggaggagaatgntttcatgttacttatactaacattagttcttctatagggtgatagattggtccaattgggtgtgaggagttcagttatatgtttgggattttttaggtagtgggtgttgagcttgaacgctttcttaattggtggctgcttttagg

SEQ ID NO: 569 - DNA, 237 bp, Homo sapien
ccaattgatttgatggtaagggagggatcgttgacctcgtctgttatgtaaaggatgcgtagggatgggagggcgatgaggactaggatgatggcgggcaggatagttcagacggtttctatttcctgagcgtctgagatgttagtattagttagttttgttgtgagtgtcaggaaaagggcatacaggactaggaagcagataaggaaaatgactatgagggcgtgatcatgaaag

SEQ ID NO: 570 - DNA, 352 bp, Homo sapien
ctgtctctccatttagagccccagttggtcctgacctcttacaaatttggtgttttcactttgatgtttatgaaccgattgcattaaaaatgcaggataatgattcagggttagagaaactattatttatacaaatgtggttaacacctcatcattttaaattggctgtgctaataatgctcattgtgctcttcagggttatgtgtgtgtgtgtgtgtgtgttttgcctgaatctgcaacctacatttgctctggcagtatgttgagtatatgctagaatagaatggacctaggcaactctaaggtcctacaactaaatacacttacttaggaaacctcctaaataagtagg

SEQ ID NO: 571 - DNA, 402 bp, Homo sapien
ctgattttaacaataactactgtgttcctggcaatagtgtgttctgattagaaatgaccaatattatactaagaaaagatacgactttattttctggtagatagaaataaatagctatatccatgtactgtagtttttcttcaacatcaatgttcattgtaatgttactgatcatgcattgttgaggtggtctgaatgttctgacattaacagttttccatgaaaacgttttattgtgtttttaatttatttattaagatggattctcagatatttatatttttattttatttgtttctaccttgaggtcttttgacatgtggaaagtgaatttgaatgaaaaatttaagcattgtttgcttattgttccaagacattgtcaataaaagcatttaagttgaa

SEQ ID NO: 572 - DNA, 70 bp, Homo sapien
  misc_feature (1)...(70): n = A,T,C or G
tggatccgagctcggtaccaagcttggcgtaatcatggtcatagctgtttcctgtgntcgttttacaacg

SEQ ID NO: 573 - DNA, 423 bp, Homo sapien
ccaatggtttcttagtgaaagagtacactagctctgaatgcaatgccctcagaaagatatcattcatagagacatacaaagcacatggcaacatgacattggaatacacgattctgagcatcttcattcatgaccaacctggctatagatttcagatgtcctcttggctcgaaggatatctgggatatccatgctcacttgcattcctttccctttaatttcattttctaagtccttcttgtattgtttctaaaagaacagaaaataatcttggagctttgcttaagctttaatagcgatgttgaaatttacatgtttgaatctcaaagccacccatgtggaaagaaaacttatgctctttccagctatgattcacggcatttattttaaactttgtatcttgctgctgtcttacctggctgg

SEQ ID NO: 574 - DNA, 129 bp, Homo sapien
ctgttaaaagaacaaacttagcaatatataacagtttgctaacaggatttttgactattcactttgcgagttatttttaaaaatccacttttttactgagtcttactacataccaggcactgtacttgg

SEQ ID NO: 575 - DNA, 684 bp, Homo sapien
  misc_feature (1)...(684): n = A,T,C or G
ccagatntgacttttcaaaactactcacattgtgaaaaangcaggaacaaatctagtttcaagttcagcatgccgttccctgtttaattcataaaacacaactggcagaagtattacttgaagcaaaacaaaagtaacgtgggaacttgcttatttgctaagccacaatgtatttttccaggaatagcataaatttgccatctttcttgtgtctatggaaaaggggtttagaattgtttcactaaaaattaaatttctatattgtcaaacatgattgtatactcaaattttaaaatgtgaagggaacacttactaagcatttcctgggtatgccactatattaagtcctagtaatatgatatagtttatttcaattttttttcaactcatacttcctttaaaatagcactgaccaaaagaaagttaacatgagcttcatgtacaatttttaatctttttgcagaaaaataaactgagaaaggctaaaattgttttatttaagccactataccaagacatattgatttcaccaatataaaaattgagatagtttacattttttggtacatctttaaaatctggtatgtatttttatactgacagcacatctcaatttggacaagctacatttccagggctcaatagtcaccatgaatctcaattgtaatcaaagaggttggcctg

SEQ ID NO: 576 - DNA, 134 bp, Homo sapien
ccttatttctcttgtcctttcgtacagggaggaatttgaagtagatagaaaccgacctggattactccggtctgaactcagatcacgtaggactttaatcgttgaacaaacgaacctttaatagcggctgcacc

SEQ ID NO: 577 - DNA, 133 bp, Homo sapien
  misc_feature (1)...(133): n = A,T,C or G
ctgtctctccattnagaagccccantnggtcctnacctcttacaaatttggtgttttcactttgatgtttatgaaccgattgcattaaaaatgcaggataatgattcagggttaganaaactattatttatac

SEQ ID NO: 578 - DNA, 200 bp, Homo sapien
cctcaaatctatcttcaaaggtgacccagcaatcagtgtcaatgcctttactgtagttaacctggtaatttcattctttagtctctccaagaaaatctgaagtgtattaggcaagtcagaacccaaattgtctccaaggttgcaaataatttgtcccatacaggaaatagccctttccttgacttcctgatcaatgtcag

SEQ ID NO: 579 - DNA, 402 bp, Homo sapien; identical to SEQ ID NO: 571

SEQ ID NO: 580 - DNA, 245 bp, Homo sapien
  misc_feature (1)...(245): n = A,T,C or G
ccaattgatttgatggtaagggagggatcgttgacctcgtctgttatgtaaaggatgcgtagggatgggagggcgatgangactaagatgatggcgggcaggatagttcagacngtttctatttcctgagcgtctgagatgttagtattagttagttttgttgtgagtgttaggaaaagggcatacaggactaggaagcagataaagaaaatgactnttagggcgtgatcatnaaangggataaa

SEQ ID NO: 581 - DNA, 294 bp, Homo sapien
tgcagcgcaagtaggtctacaagacgctacttcccctatcatagaagagcttatcacctttcatgatcacgccctcatagtcattttccttatctgcttcctagtcctgtatgcccttttcctaacactcacaacaaaactaactaatactaacatctcagacgctcaggaaatagaaaccgtctgaactatcctgcccgccatcatcctagtcctcatcgccctcccatccctacgcatcctttacataacagacgaggtcaacgatccctcccttaccatcaaatcaattgg

SEQ ID NO: 582 - DNA, 230 bp, Homo sapien
gaggtcgccctcatagtcattttccttatctgcttcctagtcctgtatgcccttttcctaacactcacaacaaaactaactaatactaacatctcagacgctcaggaaatagaaaccgtctgaactatcctgcccgccatcatcctagtcctcatcgccctcccatccctacgcatcctttacataacagacgaggtcaacgatccctcccttaccatcaaatcaattgg

SEQ ID NO: 583 - DNA, 481 bp, Homo sapien
ccaagggtgttctgcctgcctcagcctcccaaagtgctgggattacaggtgtgagccactgtgcctgaccacaggaaaacttatttaaatgagagatttgactcgaaagatcccgtttttttaaggctcttagttcttaaaagcggcacataatagaattagtataatcccaaataaattttcagtagatttttggtgtaacttgagaagatgattctgtcatttttagtgacaatttaaaagacctgaaattgtctacagccatagaaagtgaactactgatagttgtttctgtaaagttttattggaacacaaccacacctatttgttcatctgtattgtctttggttactttgtgcagagaccatggcccacaaacctaaaacattcactttctagctctttaagaaataattggcccactgacaccctggtcttaaggtctagaccaattatttctcaagagtattagctgaatcag

SEQ ID NO: 584 - DNA, 306 bp, Homo sapien
ccaattaagagctaaatttacaaaataatctctatcaggaggctttaaggtttaatgtctctaaagtccctatggatataagaggcttgaatgtactgaattcaaatttggtttttaaatgttataatagtttaggcccgagagccacatatttctgtctaagaatagaaagcatagctagctgcccacacagaatattcatatagaggtggggggcaagaacaaaatttattcatttgatacatagaaatgggactacttagaatagactcataatagaaagcatcatctggtttctcatctcag

SEQ ID NO: 585 - DNA, 308 bp, Homo sapien
ccagaatggtacagagtggagggtgttctgctaatgacttcagagaagtatttaagaaaaacatagaaaaacgtgtgcggagtttgccagaaatagatggcttgagcaaagagacggtgttgagctcatggatagccaaatatgatgccatttacagaggtgaagaggacttgtgcaaacagccaaatagaatggccctaagtgcagtgtctgaacttattctgagcaaggaacaactctatgaaatgtttcagcagattctgggtattaaaaaactagaacaccagctcctttataatgcatgtcag

SEQ ID NO: 586 - DNA, 416 bp, Homo sapien
  misc_feature (1)...(416): n = A,T,C or G
cctgtctttgaatggatgaaataggttaataaaaaacatcactgtttaaaaactagaacactgaaaaattctaggaaagcttattttcccttatatttttatggnactttcaacacttnacaacactatttnaattaanntttnttctagagtttatannatatcagtacattcttttctgtggatgcaataatatagaatcttattncaaatcttactggcaggntctnttaaattcttcaacggntgncatagtgattaaccaaaattagttatgatttctgcctatctgtgtgagaacttacaggggaaattgttctaaacctgaggaacatgaagtaactgtactgcacactccaaatgatgacagtcattttatatcaccttcaattacccaacagcttttaatagtctgg

SEQ ID NO: 587 - DNA, 382 bp, Homo sapien
cctactatgggtgttaaattttttactctctctacaaggttttttcctagtgtccaaagagctgttcctctttggactaacagttaaatttacaaggggatttagagggttctgtgggcaaatttaaagttgaactaagattctatcttggacaaccagctatcaccaggctcggtaggtttgtcgcctctacctataaatcttcccactattttgctacatagacgggtgtgctcttttagctgttcttaggtagctcgtctggtttcgggggtcttagctttggctctccttgcaaagttatttctagttaattcattatgcagaaggtataggggttagtccttgctatattatgcttggttataatttttcatctttc

SEQ ID NO: 588 - DNA, 307 bp, Homo sapien
cctactcttctccgtccattgtactatctgcccgtggtggggatggcagtaggatcatatttgatgacttccgagaagcatattattggcttcgtcataatactccagaggatgcgaaggtcatgtcctggtgggattatggctatcagattacagctatggcaaaccgaacaattttagtggacaataacacatggactaatacccatatttctcgagtagggcaggcaatggcgtccacagaggaaaaagcctatgagatcatgagggagctcgatgtcagctatgtgctggtcatttttggagg

SEQ ID NO: 589 - DNA, 89 bp, Homo sapien
cctgggtgattgaggatgcaatgagctgtgattgtgccaccacactccagcctgggcaatacagcaagactgtctcaaaaaaaaaaaaa

SEQ ID NO: 590 - DNA, 456 bp, Homo sapien
cctcagttcttgattgtggttgacggggcgtcaccatgaaggagcccatttagtataaagcttccaaccttttctcttaatcgtttctttaatcttttaaaccatcttcaagtgcataggggagtttccgatgccagaggatgaaagcaagtgctctctccaccctctcctcccagagtgaaaacaaatccttttgctgatacttgtttcaaaagcatccattgtaaagcttctcagtgacacaaaatactgagaggtaactttttatcaatcaaaccacataccccaatttaacacctttcaatgctctgaattcaactgacagactaaagggtgtttcctgtaacagtctgaaatattaagtgttttttttgttttgtttttaaatcttatttcagaaaacttcctcttggggtaggaaagtacacatgaagcagcaaagtaacgaagaaaaac

SEQ ID NO: 591 - DNA, 289 bp, Homo sapien
ccaattgatttgatggtaagggagggatcgttgacctcgtctgttatgtaaaggatgcgtagggatgggagggcgatgaggactaggatgatggcgggcaggatagttcagacggtttctatttcctgagcgtctgagatgttagtattagttagttttgttgtgagtgttaggaaaagggcatacaggactaggaagcagataaggaaaatgactatgagggcgtgatcatgaaaggtgataagctcttctatgataggggaagtagcgtcttgtagacctacttgcg

SEQ ID NO: 592 - DNA, 435 bp, Homo sapien
  misc_feature (1)...(435): n = A,T,C or G
cgcgttagatgcgccttttccggcctgtgcgtctgctctggttcctctcaggcagcaaagctggggaaggaagctcaggcaggagcctccccgacaccacagcggcacaagcagcagctaaagcaccgcactttgctctgctaaccttttacttaaatgaggttttgccaaatccacatctggaaccgcatcacacccatttgcaaggatgtttgttctttgatgaaactgcatctctactgcacatganggctttcattgtaggacaagaggagagttcgtttatttttgtaactgttttacatgttccgattanttaatcggnagcttatgtcatttgctatgcctgttgtcttctaatctctccttactaaaacattacttcaaatttnaattgacccttgtttataatttatttaacgggatttgngtgtc

SEQ ID NO: 593 - DNA, 633 bp, Homo sapien
  misc_feature (1)...(633): n = A,T,C or G
ctgtttagtcagataattgtgtccgaattgattangaaaataatagaccagccataaagcagcataaaatattatgaaactattccagaagttcagtaatatctttgggacctgctcatagcccaagttttgtgaatacttttgtagttaaaaaaaatttttactttaccagggcattgcaattcttttccatcagtgaatttcattctacagacttttcagagcatctcataatcagtcaacaaatctatttcaaatgtgtttgttactaagcaacggttgctaagagcttctgtaattaagatgaaagttccaaggtaacaatgcccaaacacagcaccattttcaccattttctgataatgcaggagtaggatggctaaaagtgaaagaagaatctactctatggaaagcatggcacctgaaatttctgaagatattggctgtcctctagcttatatgagagagagtgtttgtgctttactaatcaaccagtcatttttttcttgtgtggctgaaatgtacattccagacatgaacaggtagagtatgtgttgggggcaggtttatactgcatgggtgtgctgagacagggccacgtggtgatgtaaatgatgctgnctgacacgtgcag

SEQ ID NO: 594 - DNA, 501 bp, Homo sapien
  misc_feature (1)...(501): n = A,T,C or G
cctttacaagatgctggtaccttgatcttggacngggcaggctccaagatggaaagaaagtgagcatctgctttttagggattatccagtctatactactctgttctagccacacaaaacaggttaagacagaaattggtaccaagagtggggtgttactacagcaaatacctgaaaatgtagaagaggctttgaaatgtggtaattggaagaagctggtagaatttggaggagtaggctagaaaatgtctgtattttcatgaatggagcattaagaataattccggtgaggccatagggaaagtctaaaacttttcagaaattatgtaagcgattgtgattagtaggttggtagaaatatagacagtaaaagcaattctgatgtggtttcagaggaaaatgaaaaatattagaaactgaaggaaggggcatccttgctataaactggcaaagaacttggctgaaatgtctccatgtccaagagatttatggcagaaatgt

SEQ ID NO: 595 - DNA, 383 bp, Homo sapien
ctggtcaccatcatccctttaatcaactcacacctgtttaaagagtgtttctgatttgaccttcatcccttagtttactggcgttaaaaaaagtctcagcaattttcattatttctcgtgggtctcattatcaaacctttacttatttcggcatatttcctctgggcttcttctagtttctgccttacaagcaatgctgttctgtaaatttattgaaacctctggaacatttcacctttagagatggaggatggaaggattggtaccagaagagggctaagatacgttttctgtcttgagctgaaagcacagtctactctccttcgttttgtcgatgagaaagttgaggccagaggggaggtgacatgtttagagtcacccag

SEQ ID NO: 596 - DNA, 266 bp, Homo sapien
ccatggctaggtttatagatagttgggtggttggggtaaatgagtgaggcaggagtccgaggaggttagttgtggcaataaaaatgattaaggatactagtataagagatcaggttcgtcctttagtgttgtgtatggctatcatttgttttgaggttagtttgattagtcattgttgggtggtaattagtcggttgttgatgagatatttggaggtggggatcaatagagggggaaatagaatgatcagtactgcggcgggtagg

SEQ ID NO: 597 - DNA, 383 bp, Homo sapien
  misc_feature (1)...(383): n = A,T,C or G
ctggtcaccatcatccctttaatcaactcacaccngtttaaagagtgtttctgatttgaccttcatcccttagtttactggcgttaaaaaaagtctcagcaattttcattatttctcgtgggtctcattatcaaacctttacttatttcggcatatttcctctgggcttcttctagtttctgccttacaagcaatgctgttctgtaaatttattgaaacctctggaacatttcacctttagagatggaggatggaaggattggtaccagaagagggctaagatacgttttctgtcttgagctgaaagcacagtctactctccttcgttttgtcgatgagaaagttgaggccagaggggaggtgacatgtttagagtcacccag

SEQ ID NO: 598 - DNA, 266 bp, Homo sapien
ccatggctaggtttatagatagttgggtggttggtgtaaatgagtgaggcaggagtccgaggaggttagttgtggcaataaaaatgattaaggatactagtataagagatcaggttcgtcctttagtgttgtgtatggctatcatttgttttgaggttagtttgattagtcattgttgggtggtaattagtcggttgttgatgagatatttggaggtggggatcaatagagggggaaatagaatgatcagtactgcggcgggtagg

SEQ ID NO: 599 - DNA, 294 bp, Homo sapien
  misc_feature (1)...(294): n = A,T,C or G
ccaattgatttgatggtaagggagggatcgttgaccacgtctgttatgtaaaggatgcgtagggatgggagggcgatgaggactaggatgatggcgggcaggatagttcagacggtttctatttcctgagcgtctgagatgttagtattagttagttttgttgtgagtgttaggaaaagggcatacaggactaggaagcanataaggaaaatgactatgagggcgtgatcatgaaaggtgataagctcttctatgataggggaagtagcgtcttgtagacctacttgcgctgca

SEQ ID NO: 600 - DNA, 213 bp, Homo sapien
agatattgggctgttaattgtcagttcagtgttttaatctgacgcaggcttatgcggaggagaatgttttcatgttacttatactaacattagttcttctatagggtgatagattggtccaattgggtgtgaggagttcagttatatgtttgggattttttaggtagtgggtgttgagcttgaacgctttcttaattggtggctgcctttagg

SEQ ID NO: 601 - DNA, 471 bp, Homo sapien
  misc_feature (1)...(471): n = A,T,C or G
ncctactatgggtgttaaattttttactctctctacaaggttttttcctagtgtccaaagagctgttcctctttggactaacagttaaatttacaaggggatttagagggttctgtgggcaaatttaaagttgaactaagattctatcttggacaaccagctatcaccaggctcggtaggtttgtcgcctctacctataaatcttcccactattttgctacatagacgggtgtgctcttttagctgttcttaggtagctcgtctggtttcgggggtcttagctttggctctccttgcaaagttatttctagttaattcattatgcagaaggtataggggttagtccttgctatattatgcttggttataatttttcatctttcccttgcggtactatatctattgcgccaggtttcaatttctatcgcctatactttatttgggtaaatggtttggctaaggttgtctggt

SEQ ID NO: 602 - DNA, 482 bp, Homo sapien
  misc_feature (1)...(482): n = A,T,C or G
tgagcatacagcaataaaaataacataatttntatgtgtacaatatttatggaatacgttactggaacagataaataatttagttaataacatgacaaagaacagaaattgtatacactatacagcatagtaatagaataatgaatgattaaagttattaatattaggtagaaaatgaagggtatctttgagagcagaactcaaggaagcaagcaatttgccttatgaggaaagagttacctgtggataaaggagaaactgaaaaatttacaagtcaagactttttgagcaaaaacaaaaatatgactatgagtcaccaattcagtacagtgaaaaaaaagttgaagagatatcttggaagtaaaccatgttgtggaagagcagggttttgataatcatgggattattctgaatgaattttaaatgcgataggaatatatgagataatttcaccagagaataatatgatcatgtttgcattt

SEQ ID NO: 603 - DNA, 372 bp, Homo sapien
gttccaaccttcatttctgaaactgttctagagcactttgtctttctcgtagttcataacttaccccttcagtctagaattagaattacattatctgttttactactttactagactgtaagctcctagaagataaggactagggagttcatctctgtattccaccagaaggtacagtgactcataactagagtctttagatgaaacttactgagttgaataacttaatatatttctgttttcattcccaagggaggccatgtctggagatagaccttgaatttaataaattttaggcactataccatttcagtggagaaaattgttgggaaatttggggggatggatatataagggggaggaagtcactgg

SEQ ID NO: 604 - DNA, 468 bp, Homo sapien
  misc_feature (1)...(468): n = A,T,C or G
gcngttttgagtgagtttcttaatcctgagttctggnttgattgcactgtggtctgagagatagtttgttataatttctgttcttttacacttactgaggagagctttacttccaagtatgtggtcgattttggaataggtgtggtgtcgtgctgaaaagaatgtatattctgttgatttggggtggagagttctgtanatgtctattaggtccgcttggtgcagagttgagttcaattcctggatagccttgttaactttctgtctcgttgatctgtctaatgttgacagtggggtggtaaagtctcccattattattgtgtgggagtctaagtctctttgtaggtcactaaggacttgctttatgaatctgggtgctcctgcattgggtgcacatatatttaggacagcnagctcttcttgttgaattgatccctttaccattatgtaatggccttgnctcttttg

SEQ ID NO: 605 - DNA, 288 bp, Homo sapien
ccaattgatttgatggtaagggagggatcgttgacctcgtctgttatgtaaaggatgcgtagggatgggagggcgatgaggactaggatgatggcgggcaggatagttcagacggtttctatttcctgagcgtctgagatgttagtattagttagttttgttgtgagtgttaggaaaagggcatacaggactaggaagcagataaggaaaatgactatgagggcgtgatcatgaaaggtgataagctcttctatgataggggaagtagcgtcttgtagacctacttgc

SEQ ID NO: 606 - DNA, 572 bp, Homo sapien
  misc_feature (1)...(572): n = A,T,C or G
gaatnaaatgaatgaaatagaaaatataattgagagcttcaacaacagactataccaaatggaggaaaaaatttctgaacttgaagatagatcttttgaaataacacaagcagtggcaaaaatgaattaaaaagaataaggaaagcctaaaggatttatgagatatcattaagcaagcaaatattcatactatgggcattccagatggaaaaaagaagggtaaaggtgaggaaatcatatttaatgaaataatagcagaaaatttccggagtcttgggagagagatgagcatttaggtccagggagctcaaagaaccccaaacagattcaacccaaacaggtcctctctggagcccaacatagtcaaattgtaataagtaaaagacaaagaattccaanaagcattcaagagaaaagagtcaagtcataaataagggaatctccattaggctaacagcagatatctcagcagaaagcttacangccangagagaatgggatgatatattcaaagtacttgaaagcaggggtnggggaaaccctgctagctaaaaatattatacccttgcaaa

SEQ ID NO: 607 - DNA, 178 bp, Homo sapien
  misc_feature (1)...(178): n = A,T,C or G
ctcggggtaatctcccagcaagaggtcaggtcctggntgtgcgtcccagggtgtcagtgaaattggctgctcccctgacccagggcaccttcatgcgtcttcacagcaggactactgtgaccaaggccagacctttcatctttcaaaagactttgactaaaaatgctttaaaaaagca

SEQ ID NO: 608 - DNA, 416 bp, Homo sapien
cctgtctttgaatggatgaaataggttaataaagaacatcactgtttaaaaactagaacactgaaaaattctaggaaagcttattttcccttatatttttatggtactttcaacacttaataacactatttcaattaagttttctcctagagtttatagtatatcagtacattcctttctgtggatgcaataatatagaatcttattccaaatcttactggcaggttctcttaaattcttcaacggctgtcatagtgattaaccaaaattagttatgatttctgcctatctgtgtgagaacttacaggggaaattgttctaaacctgaggaacatgaagtaactgtactgcacactccaaatgatgacagtcattttatatcaccttcaattacccaacagcttttaatagtctgg

SEQ ID NO: 609 - DNA, 648 bp, Homo sapien
ctgatctctcagcagaaactcttcaaaccagaagagagtgggggccaatattcaacattcttaaagaaaataattttcaacccagaatttcatatccagccaaactaaccttcacaagtgaaggagaaataaaatcctttacagacaagcaaatgctgagagattttatcaccaccaggcctaccctaaaagagttcctgaaggaagcactaaacatggaaaggaacaaccagtaccatcgaggctaggaagaaaccgcatcaactaaggagcaaaataaccagctaacatcataatgacaggatcagattcacacataacgatattaactttaaatgtaaatggactaaatgctccaattaaaagacacagactggcaaattggataaagagtcaagacccatcagggtgctgtattcaggaaacccatctcaccgtgcagagacacacataggctcaaaataaagggctggaggaagatctaccaagcaaatggaaaacaaaaaaaggcaggggttgcaatcctagtctctgataaaacagactttaaaccaacaaagatcagaagagacaaagaaggccattacataatggtaaagggatcaattcaacaagaagagctaactatcctaaatatatattgcaccc

SEQ ID NO: 610 - DNA, 310 bp, Homo sapien
ccagctcttctctgtcacattcctatttctgacttctgcctggctttcagtttctgccccaccttggctttttcccagcttgaacctaatagaactccagagtttggggggaggcccagccctttgttttctgctcttgaagcatattcacacataaaaagttgtattctcttacacaaactgttttgaggctcttaccgtagtcgaaggtatcttagatcttccttagtgatctcattaagaatatccgaaagtgtataaccctcttcaacaatctgaaacaaagatcagatccttaagagctgagcag

SEQ ID NO: 611 - DNA, 254 bp, Homo sapien
  misc_feature (1)...(254): n = A,T,C or G
ctgtttttacatctaaagcaatagactagaactgaattntcttctacatagtaaaatcacaattgtggaattacaggaattctggtgatattaaggtgaaacaacaaaacacaaaaggccctattttaacagttgatgtgacagtaagttttaatagaacctgtaacttcattttggaaatgcttctccaccaaataaggcctttttcccctatttaaggagccagatggattgaaagatgtggaaataggcag

SEQ ID NO: 612 - DNA, 225 bp, Homo sapien
  misc_feature (1)...(225): n = A,T,C or G
ctgactatatcatgtcaccatcatagccaatacaacattnttgccatacttcctaaaaaccttttcgcatacactgatcatgctacttatcagcactttctaacatcctgaccaaacagacacccacacctcttatagagtacactgtgagagaataacatggacttgatatggcatcacacttgttttaaagcaaaaaaaaaagaaaaagaaaagaaaaaaaaa

SEQ ID NO: 613 - DNA, 471 bp, Homo sapien
  misc_feature (1)...(471): n = A,T,C or G
ccatcagacttcttgggtgcctggctatattcaatgtgaagtaaaaaatatcccaagtcttacaccaaaatagaggctctgacttagaagtatgcttttagctttctttttaaataagacattctggaagaaaaaaaaagaaaaaggaaagaaaatcaagtttgaaacacagttaacacttattttggcaagaaagcaaccaaaatctaaaaagcataaactatgngtccaaatgnaaaaggnattacagaacaaactgcaagaggggaaaattaaagccncactgaacgaaaaaatacagtatgtctaacattttggaattgnaatttaaaccctaagggcaaaagctgaaaaatcatgcttanacctnggncgngaccacnctaagggcgaattccancacactggcggncgttactagtggatccnanctcggtaccaagcttggcgtaatcctnggcatagctgttt

SEQ ID NO: 614 - DNA, 421 bp, Homo sapien
gttattttttagaatggctctcccatcttgagtatgtgtgatgtttcctcatgtatgaatgaagcatatacatctttgtcagaagtatcccagaagcaattctgtactctcctcattatgttctattgggtgggccatggtttttgatttgtctcattactgatgatggttacttttattatttgataaaggttgtatataacttatctattatggcataatacattagctaaaaccttggcggtgtaaaacagcagatacttacgtttctcataggaatggctctattgagtacctctgtctcaaggcttctcaagagtttgtagctaccttgttggctggggttgcggtctgacctaaaggcttagttagggggtggtagaaatcttccatatgttctttgctacgtggacctcacagg

SEQ ID NO: 615 - DNA, 242 bp, Homo sapien
cctcctatttattctagccacctctagcctagccgtttactcaatcctctgatcaggatgagcatcaaactcaaactacgccctgatcggcgcactgcgagcagtagcccaaacaatctcatatgaagtcaccctagccatcattctactatcaacattactaataagtggctcctttaacctctccacccttatcacaacacaagaacacctctgattactcctgccatcatgacccttgg

SEQ ID NO: 616 - DNA, 392 bp, Homo sapien
  misc_feature (1)...(392): n = A,T,C or G
cctaatttgtagattgtgaaagcagcttttagtttaacttatttacagaccccttataattaccatgtttttttttttnttcctaaatctnttggttcagcttgngaatnttacgtgcccgtaaagtngggatgttgaatnggcccttntttgttctggcagngagtcaagngtccancattttttcataagngttttttaaaatngttctccancattttatggctcctccctcccatgtcctcaaacccagcaaaagcgtanaggcanaattanaggacccncccgggcggccgntaagggcnaattccagcncactggcggccgttactagnggatccnagctcggnnccaagctnggcgtaatcatggncatagctgtttcctgtgan

SEQ ID NO: 617 - DNA, 215 bp, Homo sapien
cctactatgggtgttaaattttttactctctctacaaggttttttcctagtgtccaaagagctgttcctctttggactaccagttaaatttacaaggggatttagagggttctgtgggcaaatttaaagttgaactaagattctatcttggacaaccagctatcaccaggctcggtaggtttgtcgcctctacctataaatcttcccactatttt

SEQ ID NO: 618 - DNA, 433 bp, Homo sapien
  misc_feature (1)...(433): n = A,T,C or G
cttttgtntgcctgttttgtggactggctggctctgttagaactctgtccaaaaagtgcatggaatataacttgtaaagcttcccacaattgacaatatatatgcatgtgtttaaaccaaatccagaaagcttaaacaatagagctgcataatagtatttattaaagaatcacaactgtaaacatgagaataacttaaggattctagtttagttttttgtaattgcaaattatatttttgctgctgatatattagaataatttttaaatgtcatcttgaaatagaaatatgtattttaagcactcacgcaaaggtaaatgaacacgttttaaatgtgtgtgttgctaattttttccataagaattgtaaacattgaactgaacaaattacccataatggatttggttaatgacttatgagcaagctggtttgg

SEQ ID NO: 619 - DNA, 259 bp, Homo sapien
ctgcagtgtccctttttatatcatgctagtgttgagacatacttgactaacttgggaacagttcgatatattgacaaccgtcaacttaagaaaatcaacagcttttggccccagcgtccaagtgaacttttcatggagtgcagaatctcaaatggacaaaatactttgtctttttaaatactgaaaatttaattattagtactatgactgaaagattcttcatggctaaaaagctctgcatcaaactcaattcaggagg

SEQ ID NO: 620 - DNA, 393 bp, Homo sapien
ccaccaaagccacacggagattctgtcaggcgctgagacaccacagccttttcaatcttagggaaagaaatcaagtcatataaattaatatcaacaggtaaggtcattgagcaattgtctttcaactgtctaagactttatcacttaagatcataaacacagaagcaggtcataaaaatagcttttcttaaggtttaggagaatttgtaggggcacttacttgataatctgaattttctagtcagaagtttaaataccaccttttaaaaacataaaatttaatttgtaacaagttattaacaaagcagtattgtcgaaagttttaagctttctcccaataatttaattacattaattaaatttttaccattctaatggttacaaagtaaccag

SEQ ID NO: 621 - DNA, 563 bp, Homo sapien
ctgacaatgataaaattatctctatatgggcaaacgcgtgctctttgtcgaagaagaaagcttcagcttcatgttccaggtgagttaattaggcaatgtatgaatgctaatatctctttcacatattttgcttaagatctgtcttaggactctcgtctggcccatatggttttccaagggcagaagggcctctttttgatgagaggcagttttcagtaactcttaaagtgataacagcaaaggagaggagagagaagagtaagacaaatcgaaacattcttcaattgcttcttggccttttggctaagctcaagctcaaaacaggtcttcaaggagaaaatacatcacaaagaaaaggatgttttatttcttaccttgtcctagaaaaatttccataaactctattggcttaattctgtaaacttgaccaatatcagagtgcttcctaccaaggagggtagctgatgagcgtgaccatggtacatcctagaagaatgtgtgatgaagaagctttcaccgtgtaaaagagttgaaaattattcaaggagacattatggtcttgg

SEQ ID NO: 622 - DNA, 505 bp, Homo sapien
  misc_feature (1)...(505): n = A,T,C or G
tcttaagtgtgtttaatagataaagtaaactttcctagtcaagggttagatttttattatctcttgtgttccgactttctacttttcaactttgaacttcaaaaaaacattactttgcttatcctttgtactttgatcaggttgtttagaattgtagatcaaaccattctttgatcattttattgtttaaatgnttagttccatttataatttttatagccaactctcggttatttctgtcttttgagattgcaattcagaagctgtatgtcgaagtaatttatgagttgacttttatacttaggcttctttaaatactaatagtcaagaattctagagcatctaataaaaaattaactttcagatcattgggaatctgtcctcatttaaatatgtgtaaatgcatttccacagcaaattgcttcatgccctttgnctataaggaaattattccttgtagctaatacatttttcattttgcagnccaaatcttttttgagaaagg

SEQ ID NO: 623 - DNA, 489 bp, Homo sapien
cctactatgggtgttaaattttttactctctctacaaggttttttcctagtgtccaaagagctgttcctctttggactaacagttaaatttacaaggggatttagagggttctgtgggcaaatttaaagttgaactaagattctatcttggacaaccagctatcaccaggctcggtaggtttgtcgcctctacctataaatcttcccactattttgctacatagacgggtgtgctcttttagctgttcttaggtagctcgtctggtttcgggggtcttagctttggctctccttgcaaagttatttctagttaattcattatgcagaaggtataggggttagtccttgctatattatgcttggttataatttttcatctttcccttgcggtactatatctattgcgccaggtttcaatttctatcgctatactttatttgggtaaatggtttggctaaggttgtctggtagtaaggtggagtgggtttg

SEQ ID NO: 624 - DNA, 233 bp, Homo sapien
gttggggaacagctaaataggttgttgttgatttggttaaaaaatagtagggggatgatgctaataattaggctgtgggtggttgtgttgattcaaattatgtgttttttggagagtcatgtcagtggtagtaatataattgttgggacgattagttttagcattggagtaggtttaggttatgtacgtagtctaggccatatgtgttggagattgagactagtagggctagg

SEQ ID NO: 625 - DNA, 459 bp, Homo sapien
ttcgagaacatttttaataaataatgtgacaaaattacttttctgattattggattttcagtatgcaaaattatggctaaaaataaggggcttcttacatgaacataatgaaaacattaatcacatggattgttcccttagtactgcacgccttttctatggaactttttcaaattatctaaatgaacaagtttggttttggtgaacaccagcctttttttttgtggttcagttttgtttggctttgtcttccactggggtcagacctgatacttatctatctatgaataaatgtacatttttttcttcaaatagcaccaattataaaatcaatgatattcataaaatgacaaaaaaggatcatagaaatctactagtcagagggcatcatttgtcaattgaaagcaagtaatgcctctattagagattttaaggaaatcttgtaggtttcgacattgg

SEQ ID NO: 626 - DNA, 458 bp, Homo sapien
cctgatgattgttttaaacagtagaaagggttcagctaagaactacagtccactctcagccctgtcatgtactataggacaagtcttcattcacaacaaatggatagcaacaccaatctcgtaacactgggaaaactgcatacaatatttagaaggaacactaatacagcagaatctgcacacaacggagtcaaagatctgaggccaaatcctactacactttacgactttgagttggtcacttttctgaaccttagcttctccatcagtgtaaaactgatgtaaaataatataaagctatatgaaagctgatgtgatttacttgtgaaatagtatgtgcaaaaggactttgtaaaatgtaaagcactatgctggttattgtgatatctgagatatttttaaagttgcaattcaattcaacaagcattcatttagagtcatgtgcaaggcactgtgct

SEQ ID NO: 627 - DNA, 393 bp, Homo sapien
  misc_feature (1)...(393): n = A,T,C or G
ccatnngaacgcactcaggaggtggtttgttctggatgcagaaaccagagatctagtttctatccacacagacgggaatgaacagctctctgtgatgcgctactcaatagatggtaccttcctggctgtaggatctcatgacaactttatttacctctatgtagtctctgaaaatggaagaaaatatagcagatatggaaggtgcactggacattccagctacatcacacaccttgactggtccccagacaacaagtatataatgtctaactcgggagactatgaaatattgtactgggacattccaaatggctgcaaactaatcaggaatcgatcggattgtaaggacatttgattggaccgacatatacctgtgggctaggacttccagga

SEQ ID NO: 628 - DNA, 233 bp, Homo sapien
  misc_feature (1)...(233): n = A,T,C or G
ctggatttataaaatagttgaatgacaaaagaagnntgttttgacagtaaaaaaaagacattatggacaaaatatgcaaaatgtgcaaagaaaaaataaatttgcattagaaaggtgggcatttgatctctgagccctgtgccatgtaacattgccatgttctttcactgttgtttgaatgttgtaccccancccttgactctggacttaaggcaagctatgactggctttgg

SEQ ID NO: 629 - DNA, 450 bp, Homo sapien
  misc_feature (1)...(450): n = A,T,C or G
ccnggacaatntaggcaggagaaggaaataaagggtattcaattaggaaaagaggaagtcaaattgtccctgtttgcagatgacatgattgtatatctagaaaaccccattgcctcagcccaaaatctccttaagctgataagcaactccagcaaagtcgcaggatacaaaatcaatggacacaaatcacaaacattcttatacaccaataacagacaaacagaggccaaatcacgagtngaactctattccaattgctttcaagaaaattaaaatacctagggatccaacttacaagggacatgaaggacctcttcaaggagaaactacaaaccactgctcaatgaaataaaagaggatacaaagaaatggaagaacattccatgctcattggtagcttgatggggatggcattgaatctataaattaccttgggcagtatggacctca

SEQ ID NO: 630 - DNA, 486 bp, Homo sapien
cctactatgggtgttaaattttttactctctctacaaggttttttcctagtgtccaaagagctgttcctctttggactaacagttaaatttacaaggggatttagagggttctgtgggcaaatttaaagttgaactaagattctatcttggacaaccagctatcaccaggctcggtaggtttgtcgcctctacctataaatcttcccactattttgctacatagacgggtgtgctcttttagctgttcttaggtagctcgtctggtttcgggggtcttagctttggctctccttgcaaagttatttctagttaattcattatgcagaaggtataggggttagtccttgctatattatgcttggttataatttttcatctttcccttgcggtactatatctattgcgccaggtttcaatttctatcgcctatactttatttgggtaaatggtttggctaaggttgtctggtagtaaggtggagtggg

SEQ ID NO: 631 - DNA, 211 bp, Homo sapien
tttacataaatattatactagcatttaccatctcacttctaggaatactagtatatcgctcacacctcatatcctccctactatgcctagaaggaataatactatcactgttcattatagctactctcataaccctcaacacccactccctcttagccaatattgtgcctattgccatactagtctttgccgcctgcgatgcagcggtagg

SEQ ID NO: 632 - DNA, 293 bp, Homo sapien
  misc_feature (1)...(293): n = A,T,C or G
cagcgcaagtaggtctacaagacgctacttcccctatcatagaagagcttatcacctttcatgatcacgccctcatagtcatttttccttatctgcttcctagtcctgtatgcccttttcctaacactcacaacaaaactaactaatactaacatctcagacgctcaggaaatagaaaccgtctgaactangctgcccgccatcatcctagtcctcatcgccctcccatccctacgcatcctttacataacagacgaggtcnacgatccctcccttaccatcaaatcaattgg

SEQ ID NO: 633 - DNA, 263 bp, Homo sapien
  misc_feature (1)...(263): n = A,T,C or G
nggtctgcagtgtccctttttatatcatgctagtgttgagacatacttgactaacttgggaacagttcgatatattgacaaccgtcaacttaagaaaatcaacagcttttggccccagcgtccaagtgaacttttcatggagtgcagaatctcaaatggacaaaatactttgtctttttaaatactgaaaattnaattattagtactatgactgaaagattcttcatggctaaaaagctctgcatcaaactcaattcaggagg

SEQ ID NO: 634 - DNA, 491 bp, Homo sapien
cctactatgggtgttaaattttttactctctctacaaggttttttcctagtgtccaaagagctgttcctctttggactaacagttaaatttgcaaggggatttagagggttctgtgggcaaatttaaagttgaactaagattctatcttggacaaccagctatcaccaggctcggtaggtttgtcgcctctacctataaatcttcccactattttgctacatagacgggtgtgctcttttagctgttcttaggtagctcgtctggtttcgggggtcttagctttggctctccttgcaaagttatttctagttaattcattatgcagaaggtataggggttagtccttgctatattatgcttggttataatttttcatctttcccttgcggtactatatctattgcgccaggtttcaatttctatcgcctatactttatttgggtaaatggtttggctaaggttgtctggtagtaaggtggagtgggtttgg

SEQ ID NO: 635 - DNA, 270 bp, Homo sapien
ccaattgatttgatggtaagggagggatcgttgacctcgtctgttatgtaaaggatgcgtagggatgggagggcgatgaggactaggatgatggcgggcaggatagttcagacggtttctatttcctgagcgtctgagatgttagtattagttagttttgttgtgagtgttaggaaaagggcatacaggactaggaagcagataaggaaaatgactatgagggcgtgatcatgaaaggtgataagctcttctatgataggggaagtagcg

SEQ ID NO: 636 - DNA, 383 bp, Homo sapien
cctactatgggtgttaaattttttactctctctacaaggttttttcctagtgtccaaagagctgttcctctttggactaacagttaaatttacaaggggatttagagggttctgtgggcaaatttaaagttgaactaagattctatcttggacaaccagctatcaccaggctcggtaggtttgtcgcctctacctataaatcttcccactattttgctacatagacgggtgtgctcttttagctgttcttaggtagctcgtctggtttcgggggtcttagctttggctctccttgcaaagttatttctagttaattcattatgcagaaggtataggggttagtccttgctatattatgcttggttataatttttcatctttcc

SEQ ID NO: 637 - DNA, 537 bp, Homo sapien
  misc_feature (1)...(537): n = A,T,C or G
ttttaatcctggggtatataggcagnactttaaattgcaaagtcttccgggcctattttcctctacatttttgtaattaactctgggggcttacttgttttggcagtactgaaatcaaaggagctggttcttcttttctcccaattattttcatatgaaagcacctacaattagcctgttagtcctattcagatacatcaaatatcagtgaatgctttactattcgcacatttaagcatctttgttttacataaaattagagtatgaaaaccagtgttcaattttttatcttgttgagcttgtaaaatgccagcaatttaaaactaggacttttccccccataagccaaggaggtagaattactaatacaagggttaaagaaggtagattttgttttcaatatttgggtaatattagaaagattcttcccacagggaagaactagcaagtgtcccaattttttccaaacgttggggaggggaaaattcactgtatcatgaaaccctaagggtttgngtgcacttcctgctttttagg

SEQ ID NO: 638 - DNA, 445 bp, Homo sapien
  misc_feature (1)...(445): n = A,T,C or G
ccagcagaacacagnagtgatttggtcccgtttgttccccagtggggtatctatccttgtgcagggcacaagcctacatggtggctctggtcatatcattagaaaatagacagaaatgggctgcacaccagaatgaatgaattgaattgaaagggaggagtgatggtggaaaaaaaaacaagtcaattcatttagactggtagaaccagaaccactgtgtagtacatccaaacggttaaaattccctggaagatgttacataatcctatcatggtgtttatttatggaaatctattttaaaaattttatgtaatactgcacagtctgtttgcatgatgccttgtacgtagtagcaactcagtaaatactttttgaatgaactagtatagtattttaattagctagtcttcgtgtactggtacaaaagaacagtgtcatcttacag

SEQ ID NO: 639 - DNA, 584 bp, Homo sapien
gcttgagtattctatagtgtcacctaaatagcttggcgtaatcatggtcatagctgtttcctgtgtgaaattgttatccgctcacaattccacacaacatacgagccggaagcataaagtgtaaagcctggggtgcctaatgagtgagctaactcacattaattgcgttgcgctcactgcccgctttccagtcgggaaacctgtcgtgccagctgcattaatgaatcggccaacgcgcggggagaggcggtttgcgtattgggcgctcttccgcttcctcgctcactgactcgctgcgctcggtcgttcggctgcggcgagcggtatcagctcactcaaaggcggtaatacggttatccacagaatcaggggataacgcaggaaagaacatgtgagcaaaaggccagcaaaaggccaggaaccgtaaaaaggccgcgttgctggcgtttttccataggctccgcccccctgacgagcatcacaaaaatcgacgctcaagtcaagaggtggcgaaacccgacaggactataaagataccaggcgtttccccctggaagctccctcgtgcgctctcctgttccgac

SEQ ID NO: 640 - DNA, 404 bp, Homo sapien
ccataggaacgcactcaggcaggtggtttgttctggatgcagaaaccagagatctagtttctatccacacagacgggaatgaacagctctctgtgatgcgctactcaatagatggtaccttcctggctgtaggatctcatgacaactttatttacctctatgtagtctctgaaaatggaagaaaatataggagatatggaaggtgcactggacattccagctacatcacacaccttgactggtccccagacaacaagtatataatgtctaactcgggagactatgaaatattgtactgggacattccaaatggctgcaaactaatcaggaatcgatcggattgtaaggacattgattggacgacatatacctgtgtgctaggatttcaagtatttggtgtctgg

SEQ ID NO: 641 - DNA, 138 bp, Homo sapien
  misc_feature (1)...(138): n = A,T,C or G
ctgtgacaggaacattacctgaagtgcagggtggttacctgcacaaagtcccatttccaaaaatttctgtgtaattcaccagaaattttggatggaataattagaaaaaaaaaaagaggttaaaacntgtaactcaaa

SEQ ID NO: 642 - DNA, 381 bp, Homo sapien
  misc_feature (1)...(381): n = A,T,C or G
ctgtaggtggaatttttacccagaaaagataggccctagaagcctcatttcttttctccatggaaaaggacagccctctgctgcagcgttcaacttgtgtgtttactgacagagtgaactacagaaatagcttttcttcctaaaggggattgttctacattttgaagttattttttaataaaattgaattatgttgtgtattgtgcttcctaataggaaatgcattattggactgtttttgtaacatcctgtttattgcaaatagctagtatcgttcaaaaactgtataaaatacttttgtacatattagcaatgtctaatttgtatacacttcagttaaatttccctaaaacttgaaaggggaccttgtanaaattaaaa

SEQ ID NO: 643 - DNA, 403 bp, Homo sapien
ccttcctaaaaaatagtggtgagctggaggctacttccgccttcttagcgtctggtcagagagctgatggatatcccatttggtcccgacaagatgacatagatttgcaaaaagatgatgaggataccagagaggcattggtcaaaaaatttggtgctcagaatgtagctcggaggattgaatttcgaaagaaataattggcaagataatgagaaaagaaaaaagtcatggtaggtgaggtggttaaaaaaaattgtgaccaatgaactttagagagttcttgcattggaactggcacttattttctgaccatcgctgctgttgctctgtgagtcctagatttttgtagccaagcagagttgtagagggggataaaaagaaaagaaattggatgtatttacag

SEQ ID NO: 644 - DNA, 688 bp, Homo sapien
  misc_feature (1)...(688): n = A,T,C or G
cctatttatttgttttggccctggatctttcctaatcacaattatatttctttatttttgcctttgagcagtttcatttatctttgtgggcagggaagattaaatatgaaattcagtccagtcattttgctactggttagctttagtttgaggcaagtaaaaatttttgattaaaattagtttcttaaaattatgcccttgctttaccaaataatcaaattggctaaaaaataagggtatgtaactttgcattttgaagaacaaaccaataatttttcatgagccctactcgatcttctttaaagaagaccttcctaagagacaattagggatgagtttgattaatgggaaatagctctaggttagattattttaaattccatacaccaagtgatttaaccacagtggcagtggcagcttctgaaccgtcaagtatgaacatcacttaaaaattaaaagatgcttaataataaactcttaattttcattaagccaatctgtaattcagaagaaaagcatatgtctgccatgggactattgcagtgcgtctccatcagtgttaacacaggagagatatgttattttatgtgtatgtcttagtttgggatatgtggtagtaagaacatgtcaagagtgcttttcttcaaacctgncagctcaactgangaaagacaggtacttccattgc

SEQ ID NO: 645 - DNA, 484 bp, Homo sapien
  misc_feature (1)...(484): n = A,T,C or G
ccaaatgtgtctccagcccacacttccaggtggcagagcgagctctctattactggaataatgaatacatcatgagtttaatcagtgacaacgcagcgaagattctgcccatcatgtttccttccttgtaccgcaactcaaagacccattggaacaagacaatacatggcttgatatacaacgccctgaagctcttcatggagatgaaccaaaagctatttgatgactgtacacaacagttcaaagcagagaaactaaaagagaagctaaaaatgaaagaacgggaagaagcatgggttaaaatagaaaatctagccaaagccaatccccaggtactaaaaaagagaataacatgaaaacgcccagggttacttgaatgtttttataagataggaatatatgtcttcaccatgggggggggtctcggatttcactaacgttgtatatgaaaatgggtgcnataaaaagtacttttaaactttgt

SEQ ID NO: 646 - DNA, 447 bp, Homo sapien
  misc_feature (1)...(447): n = A,T,C or G
gggtcgcgttgaacaacttggttcaagatggtgggggcatttttagagcggcaataattgaaaaaaaaggcgaactctgccttggagaggtagatgataagaaataaaaaggtgtttataactattttgtattataaagtgggccttagagataggaagaagaatgatggattccttttggatcaatcagaaaggaaacacgaaagaaaagtcaggaaggtagagagagaaaaagggagggaaggagaaagaatgggaataaaataaggaggtaagagatactatttttgctgagcaaccagtgtgtttcaggatgatacaaagaaaaatatagaatagaaataagtgcaggcttggaatcagctacaaatcctaaagatggggtgtgtgtggatgtgtgtgtgtgtgtgtgnacaccattgtgtgtttgtaaaatgtgtatgtccc

SEQ ID NO: 647 - DNA, 388 bp, Homo sapien
gaaggtgatataaaatgactgtcatcatttggagtgtgcagtacagttacttcatgttcctcaggtttagaacaatttcccctgcaagttctcacacagataggcagaaatcataactaattttggttaatcactatggcagccgttgaagaatttaagagaacctgccagtaagatttggaataagattctatattattgcatccacagaaaagaatgtactgatatactataaactctaggagaaaacttaattgaaatagtgttattaagtgttgaaagtaccataaaaatataagggaaaataagctttcctagaatttttcagtgttctagtttttaaacagtgatgttttttattaacctatttcatccattcaaagacagg

SEQ ID NO: 648 - DNA, 632 bp, Homo sapien
  misc_feature (1)...(632): n = A,T,C or G
cctggctgggcntttgacctgcgnttttaaatnactcacagagggtgggacaggaggaagagtgaaggaaaaggtcaaacctgttttaagggcaacctgcctttgttctgaattggtcttaagaacattaccagctccaggtttaaattgttcagtttcatgcagttccaatagctgatcattgttgagatgaggacaaaatcctttgtcctcactagtttgctttacatttttgaaaagtattatttttgtccaagtgcttatcaactaaaccttgtgttaggtaagaatggaatttattaagtgaatcagtgtgacccttcttgtcataagattatcttaaagctgaagccaaaatatgcttcaaaagaagaggactttattgttcattgtagttcatacattcaaagcatctgaactgtagtttctatagcaagccaattacatccataagtggagaaggaaatagatagatgtcaaagnatgattggtggagggagcaaggttgaagataatctggggttgaaattttctagttntcattccgtacatttttagttagacatcagatttgaaatattaatgttacctcctcaatggggtggtatcagacctgcccgggcggncgnntc

SEQ ID NO: 649 - DNA, 300 bp, Homo sapien
  misc_feature (1)...(300): n = A,T,C or G
nggtgaagatagaanaaatataagcgaaattggataaaatagcactgaaaaaatgaggaaattattggtaaccaatttattttaaaagcccatcaatttaatttctggtggtgcagaagttagaaggtaaagcttgagaagatgagggtgtttacgtagaccagaaccaatttagaagaatacttgaagctagaaggggaagttggttaaaaatcacatcaaaaagctactaaaaggactggtgtaatttaaaaaaaactaaggcagaaggctttggaagagttagaagaatttggaagg

SEQ ID NO: 650 - DNA, 498 bp, Homo sapien
  misc_feature (1)...(498): n = A,T,C or G
ngtnctgntaaacagaagggtacaangcccttctggctttaagcagtcataggaatgtgacagacattcctcttagggagcgcctcctcctagggtttcctcatctgtctcacactgagtggatgtaatgctattttaatcctgctgtggcccccaatactagtacttgtccataccttcttgcatttttagcgtctgctctgtggggttgttaggccctggcactcccaggaactagtgctaaagctgcatctntctctcccctctagggatcgataaagtttcactgcagaaagtctccactgcggtatgctgacatctgccctgaaccttcaccctacagcattacaggctttaatcagattctgctggaaagacacaggctgatccacgtgacctcttctgccttcactgggctggggtgatccttggtgcctttgtttccacaaggccttttcctgccccctgccttgccaaagacatttaatcagcacacag

SEQ ID NO: 651 - DNA, 654 bp, Homo sapien
  misc_feature (1)...(654): n = A,T,C or G
ctgagggtccccaggtttctaaagctctcaggacgagaaagtaggtcccaagataaggagcctaaagggcttttttctttctgtgtattccttcttggcctccaacatgggtacagtcacaagagcatgtaacagagaagaaggactanacctaccattttctggataaagaattggaaagaggatccacaggtaaccaaaaagtaccagggaaatggcagagaaggaaaacctcaggagaccaacctcataagtggtatttattagngcctgggctcaaatccaaattgtacatgaatatgtctggtcctagatagggtaccgaagactttgaaagtgaattttggtatatcattgcccagattccagactggntattgtgtgacacaacatacaggatatatctgaatagtgctcagaagagtttgaaaatgcaaatgatattaaaataaagatgaaaaagagaaagctggtcagaacttgtggacataacccttctggatctgtngcctgattaaaaaatagttgatattctcgaatgaattaaaacaagatttagagactgagcatggtagctnattcttgtaatccaacnctttgggagggcaaggcaanagaattgcttgcggccaggagttttgagaccagcttggg

SEQ ID NO: 652 - DNA, 293 bp, Homo sapien
  misc_feature (1)...(293): n = A,T,C or G
ngtctgttgcactgaggtgactaaggatacattttgaggaagtagctccaagaacatttccattttcactgtgccttcacatacatctaatggaaatgaacagcacccttcatccatccacggaagcgattaagaaaagggtgggatggaaaaattaacccaacaatattagatcaatacgtagtatttaagngtccataatgtgccaggctgaagatgcacgggaaaaccacactagccggtctgtcaagggcttgagaataccataaacaagaaaacagacgaaccaattt

SEQ ID NO: 653 - DNA, 294 bp, Homo sapien
  misc_feature (1)...(294): n = A,T,C or G
ngtccaccactgcagccctacatacagttgaaaaaaaattccattctgttaacatttgttttataagttttcacgcaatacacaaaaaacccctctgcacttcttgtaaagaacaaaaaagatacacaacagttaagcgtaaagatcacaggcaatagcattcaaacatggatgtgggtagagaaaggagtacctggcatgagtacctgcttagtttgactgaatccttgatttttaatttggcttttcatgggccgctcacaacaccaacgctgtgtgaggtatggtagtcag

SEQ ID NO: 654 - DNA, 250 bp, Homo sapien
ctgtccttgaacaagtatcaatgtgtttatgaaaggaagatctaaatcagacaggagttggtctacatagtagtaatccattgttggaatggaacccttgctatagtagtgacaaagtgaaaggaaatttaggaggcataggccatttcaggcagcataagtaatctcctgtcctttggcagaagctcctttagattgggatagattccaaataaagaatctagaaataggagaagatttaattatgagg

SEQ ID NO: 655 - DNA, 494 bp, Homo sapien
ccattataattttataacaccattaccctttaaattctaccgattataagcagcgtaaaagtaactatataaagcaaacatcgcaaaggaactctgcaggagctcttaattcctttatgtagctatcataaaattcactttcctgaagacatttactctcattcacttccaaactccaaacctttttctggtagcaccacttttgtttttaatagaaagatgagttcatatctgtacatctctccaaagctctaaggaatgagaaaaggatcctagtatattgaaattactgatgtttaatacctctgccttttcactaaaagccatttaatatttttaaagtcaaaacttgacatacaggtatttataaggaatctccatgactctgaaggaatgaaattgatgtaggtagctttggctatgtaaagacatagtagaggacaattacttaaagaagagttttcttttgaggatttgtagatttgactaagcag

SEQ ID NO: 656 - DNA, 477 bp, Homo sapien
cgcgttactgtacatattgctagcaggagacaactggaaatactaaacaaatactggaattcacattacagacagacgaaaccaacatggatgccacacataacttcctttgtagtttcacagagggcctatttgtggttgctcaggtggggtcatacattgcttgcagaaatggcctgatcatagctctatgaaacaatgaattcggaatgaaatcttaccatgacacctctctgtaggaaagaaatgttgcttcacgtgtgctaagttgagataataatatttcacatatttatatacagagaatcactctcaaatttaacccaagataagcaataggatttgggggtgacttgtacacatttctaacaacacttttcttttttctagaggtcactctcaaacactgatatatcactatagtttgagtgtagggattcagtaatcaaaggttgttattgcaaaagagccaggcag

SEQ ID NO: 657 - DNA, 576 bp, Homo sapien
  misc_feature (1)...(576): n = A,T,C or G
cctctacctgtanatcactatttttctaaagacaatttggtgttttgaagataaatgtcattagtctatgataatagcatcataggacaattagccattttagacttgaccatattttctctttttagcatatagccatcttgatatttaggtgggagactactccaatggagcaacagtttcattttacatgattggatttagaaatttacaaattttaaactcataagaattctaaataatttgaaaatggaaacatttgacccacagtctagcagcataaatacatttataaaatacttcattgttgatcttaggtcattgatttaaaacagaatttggtgactatgggcaggtggagggggccagtgaggaaggtataaaagagaaatctttatgaattgtgttcagattgattttgtataaacataatatattcatggttgtatctcttatttataatacccaactaacatgaaggtggtccaagggaaggatcaatattttaaataacatatttgcttaaaatatcatacagtggctgcttcataaaaaatcttataaacttttattacc

SEQ ID NO: 658 - DNA, 344 bp, Homo sapien
  misc_feature (1)...(344): n = A,T,C or G
cctgaaaagaaagntgctcttatggactcttgcatgttaagactatgtcttcacatcatggtgcaaatcacatgtacccaatgactccggctttgacacaacaccttaccatcatcatgccatgatggcttccacaaagcattaaacctggtaaccagagattactggtggctccagcgttgttagatgttcatgaaatgtgaccacctctcaatcacctttgagggctaaagagtagcacatcaaaaggactccaaaatcccatacccaactcttaagagatttgtcctggtacttcagaaagaattttcatgagtgttcttaattggctggaaaagcaccag

SEQ ID NO: 659 - DNA, 230 bp, Homo sapien
ctgctttccctgctaaacagttccagagcaaaagcagcaaaaagaaaatatgggagggatatgggcaacgtatactcgaacgtacgcagagaagagagtacggttagctctaatatttctcattgaacttggtggtatgtgccttccctgcatataaggccatagtgcttttttgggagcgctagaatatccatccacttgacagtgaccacaaaataggctgtttccag

SEQ ID NO: 660 - DNA, 80 bp, Homo sapien
ctggtccttgttaaactcgatcaccactttggagagatcgactggaggctcctgggtgttctgaggggcctgggggacag

SEQ ID NO: 661 - DNA, 535 bp, Homo sapien
  misc_feature (1)...(535): n = A,T,C or G
ctgaaccatatctgattaactctttggtctctgttattggaacaaaaccgacgctatgcctgcagccgccagactgcaaccaaaaacacagtttggggtcagaagacattaaaaatcacaataaaataggatgaatgttctaagtcacgcaactgaatcaaggcacctttttttttcaaaagcaaaaagttgtttaacaatattccagaatagtagatacttcaaaaaccagattacagtatatatcattttgctgcacattttagtctattttctgtatacatagtcacacattctttaccctctcccaacttatacatgctttatccccccagtcatgtgctatgtaggtataaaaaaataaagttgtatctaaacaagtgatttaaaaaaaaaaactaacgaatgccncnatnataacnctgaacttgtttccctnttgaaggacattggaaatgttaccgaggttnntttacctnggccgcaaccncnctangggcnaattccagcncactgggggccgttactaggggat

SEQ ID NO: 662 - DNA, 257 bp, Homo sapien
cctgactaaagcacatatcacactccctacacttccatgttttctctcccatgtggaccctctgatgcatatcaagattcaagcgcctgttgtagcccttcccacagtcctcacatttgtatggcttttctacactgtgaactttttcttgcactttagagaatgaattctgtacaatgttcttcccatgctgctcacatttgagaggtgtttctctgctgtggcgtctctgatgggtcagacgagttgaggaccag

SEQ ID NO: 663 - DNA, 516 bp, Homo sapien
  misc_feature (1)...(516): n = A,T,C or G
ccaattataggtattttattttttaaagattagagngttcttgaagctctttctatttctttgtcaatgaactaaacattggcaaatatgtagggtttcccacataagaacattattaacatcaaaatagaaagctggtggtagaaataatgattgggaacacagagtctctactcagcgttctacttctgccataccataactttgtgatctcacgaaatatctctccatgttctcatccctatgtatagttctgtcatttttcaataagagctttttgcttaattatgaagtactagttactataaccattattttgagcttcatgtaaatcaagaacacatggactccacttgcaaaacattgaaaatgtagttagggattgggggcaaaaagcaacattttaaaatgtgtaaagacaatgagtaagcaacaaagtgtccaattttttaggcgaaagttgcatatgtcaggaaaaggcaggattaagtaatagagaatttgaatgataactgg

SEQ ID NO: 664 - DNA, 212 bp, Homo sapien
gtccgaggaggttagttgtggcaataaaaatgattaaggatactagtataagagatcaggttcgtcctttagtgttgtgtatggctatcatttgttttgaggttagtttgattagtcattgttgggtggtaattagtcggttgttgatgagatatttggaggtggggatcaatagagggggaaatagaatgatcagtactgcggcgggtagg

SEQ ID NO: 665 - DNA, 408 bp, Homo sapien
  misc_feature (1)...(408): n = A,T,C or G
atccaggggtncccggtngctgcngggaaacctccagccttgttcttcaaaccactcagctcatgtgttttgcgctgactagtactgaataatacaaccactcttatttaatgttagtattatttatttgacaactcagtgtctaacagcttgatatgcaggtccttgcatcctacatttctttaggaagttacccatttgtaactttaaaaacaggaaaaatatcagttggcaaatgcaatcttttttttttttaagctaaaggggggnnaacngnaannaaaatntttntgangtngggtctataagcacccttgangggatntgttaaaagngncatnaangggggattctcntttngcaaaaaaatntaannatcaatttatananctttatttttnactttnt

SEQ ID NO: 666 - DNA, 635 bp, Homo sapien
  misc_feature (1)...(635): n = A,T,C or G
ctgaagnacaagggtcaggcaaaaataagatcacaatcaccaatgaccagaatcgcctgacacctgaagaaatcgaaaggatggttaatgatgctgagaagtttgctgaggaagacaaaaagctcaaggagcgcattgatactagaaatgagttggaaagctatgcctattctctaaagaatcagattggagataaagaaaagctgggaggtaaaccttcctctgaagataaggagaccatggaaaaagctgtagaagaaaagattgaatggctggaaagccaccaagatgctgacattgaagacttcaaagctaagaagaaggaactggaagaaattgttcaaccaattatcagcaaactctatggaagtgcaggccctcccccaactggtgaagaggatacagcagaaaaagatgagttgtagacactgatctgctagtgctgtaatattgtaaatactggactcaggaacttttgttaggaaaaaattgaaagaacttanctctcgaatgtcattggaatcttcacctcacagtggngttgaaactgctatagcctaagcnggctgtttactgntttncattagcaggtgctcaccatgtctttggggtgggnggggggagaaagaaagaan

SEQ ID NO: 667 - DNA, 388 bp, Homo sapien
gaaggtgatataaaatgactgtcatcatttggagtgtgcagtacagttacttcatgttcctcaggtttagaacaatttcccctgtaagttctcacacagataggcagaaatcataactaattttggttaatcactatggcagccgttgaagaatttaagagaacctgccagtaagatttggaataagattctatattattgcatccacagaaaagaatgtactgatatactataaactctaggagaaaacttaattgaaatagtgttattaagtgttgaaagtaccataaaaatataagggaaaataagctttcctagaatttttcagtgttctagtttttaaacagtgatgttttttattaacctatttcatccattcaaagacagg

SEQ ID NO: 668 - DNA, 498 bp, Homo sapien
  misc_feature (1)...(498): n = A,T,C or G
tgatcttaacaaaattcgtagcagtggaaccttgaaatgcatgtggctagatttatgctaaaatgattctcagttagcattttagtaacacttcaaaggtttttttttgtttgttttctagacttaataaaagcttaggattaattagaagaagcaatctagttaaatttcccatttgtattttattttcttgaatacttttttcatagttattcgtttaaaaagatttaaaaatcattgcactttggtcagaaaaataataaatatatcttatgaatgtttgattcccttccttgctatttttattcagtagatttttgtttggcatcatgttgaagcaccgaaagataaatgatttttaaaaggctatagagtccaaaggaatgttcttttacaccaattcttcctttaaaaatntctgaggaatttgttttcgccttacttttttttcttctgtcacaatgctaagnggtatccgaggttnttaatatgagattt

SEQ ID NO: 669 - DNA, 622 bp, Homo sapien
ccttagccaaagaatgcagtggagccttcccccttcaactgcattgtgaatgaataccaattaacagcataaaaattaatagtcccatatcagatctggaaggggtttctggggctgtctgatgtccctatcctgttgtagtgaacacaatagcagaaaattctttctgggtccatctgctataaagtcttggtaaaacagcattactatgaagaggatgaactcacctaccttcagatggaggaaaagtgaaaaggacttaggctttagtcctccatgacttttcttaagcactacctacctgtaataagctgagtgcaaaaggatgccgaagaaaatctgcacccagaagctgttagaaagcactgcagagaacagggtatgaagaaaataaagagttcttaataaacccttaagattctttgttcaaggtaaccttgccaaaagggcagagtaggtggcaaagagttgcttttaatctagctctacactgcatttgaaaataaaatttgcccattttgaatatattgtttataattaaatgtgctttttacactgcaggtcaatataaaaactggttagtaaatttccagcgagcatttatgttcatttgctcacagca

SEQ ID NO: 670 - DNA, 477 bp, Homo sapien
ttgggccctctagatgcatgctcgagcggccgccagtgtgatggatatctgcagaattcgcccttgccgcccgggcaggtgatggatgaggagcaaaaactttatacggatgatgaagatgatatctacaaggctaataacattgcctatgaagatgtggtcgggggagaagactggaacccagtagaggagaaaatagagagtcaaacccaggaagaggtgagagacagcaaagagaatatagaaaaaaatgaacaaatcaacgatgagatgaaacgctcagggcagcttggcatccaggaagaagatcttcggaaagagagtaaagaccaactctcagatgatgtctccaaagtaattgcctatttgaaaaggttagtaaatgctgcaggaagtgggaggttacagaatgggcaaaatggggaaagggccaccaggctttttgagaaacctcttgattctcagtctatttatcag

SEQ ID NO: 671 - DNA, 127 bp, Homo sapien
gtgtgtgtgtctacttgggcgtgtttaacgtgtgcgtttgtgtctgcgtgtgcatgtgtctgtgtgtgcgcgtgtatttcagtttgggttgccggatcccatatgattgcgtgcctgtgtacctgag

SEQ ID NO: 672 - DNA, 400 bp, Homo sapien
gggtctgcacagctatgttaacagcatccttataccaggagtaggaggaaagacacgactggaaaagcaattcaagctggtcacacagtgtaatgcaaaatatgtggaatgtttcagtgctcagaaagagtgtaacaaagaaaagaacagaaactcttcagttgtgccatctgagcgtgctcgagtgggtcttgcaccattgcctggaatgaaaggaacagattacattaatgcttcttatatcatgggctattataggagcaatgaatttattataactcagcatcctctgccacatactacgaaagatttctggcgaatgatttgggatcataacgcacagatcattgtcatgctgccagacaaccagagcttggcagaagatgagtttgtgtactgg

SEQ ID NO: 673 - DNA, 600 bp, Homo sapien
  misc_feature (1)...(600): n = A,T,C or G
ctggcgttgctcattagtgaatgtatgacagcaggatgtgaggggatgcccaggagtcagtgttagcattgtcatctgagatcactgctattaatatcatccattaatttattagtgagcttcactatatgcagactgggagataaggagaaaatctgtcacattctctctagctaatcagatcagctaccaattaatgagattctgaatgaaatatcaatatgtgtttttctaatttggacctaggacagagctgttgcttgtcatagagaaaaacaataatgcttaaacatagcacattataattaaagcaggtttctcacatacttttcattttatcctttggataattttgtgaggaacgcaggacaccaacttccctttcatagatacaatccccatgctattgatgaaagtgtttttgaatgaagccatacaacaaataactgatcaaagtggcattacaccaaaatttcttagtaggactcctgcatagaatgtttagatagacgtgaaaagtttgttcangaggaccagcaagagagaaactgggttctttgggagggtttcggtgctacatttataccctncatcagagtn

SEQ ID NO: 674 - DNA, 140 bp, Homo sapien
ggtggttggtgtaaatgagtgaggcaggagtccgaggaggttagttgtggcaataaaaatgattaaggatactagtataagagatcaggttcgtcctttagtgttgtgtatggctatcatttgttttgaggttagtttga

SEQ ID NO: 675 - DNA, 245 bp, Homo sapien
gttgggtggttggtgtaaatgagtgaggcaggagtccgaggaggttagttgtggcaataaaaatgattaaggatactagtataagagatcaggttcgtcctttagtgttgtgtatggctatcatttgttttgaggttagtttgattagtcattgttgggtggtaattagtcggttgttgatgagatatttggaggtggggatcaatagagggggaaatagaatgatcagtactgcggcgggtagg

SEQ ID NO: 676 - DNA, 621 bp, Homo sapien
  misc_feature (1)...(621): n = A,T,C or G
ctgtccccagggnaaatagtngaattcaactaagatctgttaataagatgtcagaataactaataattttattaggaaaaaatcatgttttaaatttcaaaatgacacttatttgtcaagtaatatgatcttggaaaattttaaagaaaaataatcctacttataaactacttttttataattgttttcagaaaaaaagtttacagtcttaaggaaaatattcaggtctatcatatggtttgacagattttttaaaagttatttttggtaaggtcttcttttagaaaaaaattaatctcaagggttttttgtaccactataatctctaatacttactcagaattactgtgtatttacttaatttcttattatgtgccttattatgtgcttaagatacaataggttagagtttaatctaaatatcttgaaagctatattgtgggcttggtaagcattttgttttttctttctctgttttggtaaggatttaaaatttttttcattgcaattttaagtggttttcaataagtaatagtttttatcaaatttttggtgcttggtgcagagacggcgtggggaagggtgaatggttttgggaataattcagtgcacacctggggg

SEQ ID NO: 677 - DNA, 210 bp, Homo sapien
  misc_feature (1)...(210): n = A,T,C or G
tttacataanatattatcagcatttaccatctcacttctaggaatactagtatatcgctcacacctcatatcctccctactatgcctagaaggaataatactatcactgttcattatagctactctcataaccctcaacacccactccctcttagccaatattgtgcctattgccatactagtctttgccgcctgcgaagcagcggtagg

SEQ ID NO: 678 - DNA, 383 bp, Homo sapien
  misc_feature (1)...(383): n = A,T,C or G
gtaggagtcaggtagttagggttaacgagggtggtaaggatggggggaattagggaagtcagggttagggtggttatagtagtgtncatggttattaggaaaatgagtagatatttgannaactgattaatgtttgggnntgagtttntatatcacagccanaattntatgatgnaccatgtancgaacaatgctacagggatgaatattatggagaagtantctantttgaagcttagggagagctgggttgtttgggttgnggctcantgtcagttccanataataacttcttggtctaggcacatgaatattgttgtggggaanagactgataataaaggtggatgcgacaatggattttacataatgggggtatnagtt

SEQ ID NO: 679 - DNA, 371 bp, Homo sapien
aaaatgaaaatattgacaagagtttcagatagaaaatgaaaaacaagctaagacaagtattggagaagtatagaagatagaaaaatataaagccaaaaattggataaaatagcactgaaaaaatgaggaaattattggtaaccaatttattttaaaagcccatcaatttaatttctggtggtgcagaagttagaaggtaaagcttgagaagatgagggtgtttacgtagaccagaaccaatttagaagaatacttgaagctagaaggggaagttggttaaaaatcacatcaaaaagctactaaaaggactggtgtaatttaaaaaaaactaaggcagaaggcttttggaagagttagaagaatttggaagg

SEQ ID NO: 680 - DNA, 176 bp, Homo sapien
cctaggattgtgggggcaatgaatgaagcgaacagattttcgttcattttggttctcagggtttgttataattttttatttttatgggctttggtgagggaggtaagtggtagtttgtgtttaatatttttagttgggtgatgaggaatagtgtaaggagtatgggggtaattatg

SEQ ID NO: 681 - DNA, 152 bp, Homo sapien
ctggagatggatatgagactagtcaagatgtgaatgctaattggagagaaatataattttaggaagatgcacattgatgtggggttttgatgtgtctgattttgactactcaagctctgtttacagaagaaaattgaatggcgagggtgtgg

SEQ ID NO: 682 - DNA, 141 bp, Homo sapien
ccagtgcttgcttgccgtggtttagtgattgggtgttagaaataaaaactcaggtctatttcttaccagtcagtaacaatttttagagaatgtacttggtatataatatatggacttcaggaactttgttggggtgggggg

SEQ ID NO: 683 - DNA, 308 bp, Homo sapien
ccagcaatggtacagagtgagggtgttctgctaatgacttcagagaagtatttaagaaaaacatagaaaaacgtgtgcggagtttgccagaaatagatggcttgagcaaagagacagtgttgagctcatggatagccaaatatgatgccatttacagaggtgaagaggacttgtgcaaacagccaaatagaatggccctaagtgcagtgtctgaacttattctgagcaaggaacaactctatgaaatgtttcagcagattctgggtatcaaaaaactagaacaccagctcctttataatgcatgtcag

SEQ ID NO: 684 - DNA, 277 bp, Homo sapien
tggtattaggattaggatgtgtgaagtatagtacggatgagaaggttggggaacagctaaataggttgttgttgatttggttaaaaaatagtagggggatgatgctaataattaggctgtgggtggttgtgttgattcaaattatgtgttttttggagagtcatgtcagtggtagtaatataattgttgggacgattagttttagcattggagtaggtttaggttatgtacgtagtctaggccatatgtgttggagattgagactagtagggctagg

SEQ ID NO: 685 - DNA, 457 bp, Homo sapien
  misc_feature (1)...(457): n = A,T,C or G
ctgtggcgtnccctacttctcccaaacctcgcaactccctcccaggacagtcagtgccaaagaaacaggtcgctgaaaactaaaatgtccacatccctaactggcaacccacatcaaccccaaaaggttgaagaatcatctaagatatttcagatgctctatgaagaaattcactttaacacttataactgtaagactttgcatacattacaacagtgcattagtgatacaagttgtaaaatacgtttccattcctttggattttgcatatgatggttttgcatcagtcactgcaggtagattgagcaagctttttgtgtttgtttttttaaacatgcattcaactagatatgattcagaatagattaatactccctttttatcactacagttagctaaaaaattgccaggcagtccacaaaacagaatttgctttaagaccaacccacagagtcag

SEQ ID NO: 686 - DNA, 234 bp, Homo sapien
  misc_feature (1)...(234): n = A,T,C or G
ntggatttataaaatagttgcaatgacaaaagaagtatgttttgacagtaaaaaaaagacattatggacaaaatatgcaaaatgtgcaaagaaaaaataaatttgcattagaaaggtgggcatttgatctctgagccctgtgccatgtaacattgccatgttctttcactgttgtttgaatgttgtaccccagcccttgactctggacttaaggcaagctatgactggctttgg

SEQ ID NO: 687 - DNA, 315 bp, Homo sapien
  misc_feature (1)...(315): n = A,T,C or G
nngtctgtgaaaaactctttggatgattctgccaaaaaggtacttctggaaaaatacaaatatgtggagaattttggtctaattgatggtcgcctcaccatctgtacaatctcctgtttctttgccatagtggctttgatttgggattatatgcacccctttccagagtccaaacccgttttggctttgngtgtcatatcctattttgtgatgatggggattctgaccatttatacctcatataaggagaagagcatctttctcgtggcccacaggaaagatcctacaggaatggatcctgatgatatttggcag

SEQ ID NO: 688 - DNA, 522 bp, Homo sapien
  misc_feature (1)...(522): n = A,T,C or G
ctgaattagaggaggagaaaagaagccattnnggagtactttaattgtttagatgtgagaggctgaatgtttgggttaagatgttagttgtcagaatcatgagaaaaggttttaagcaaggggcatttctaattctaaaaataacaactactgttatttattgagcactatctttttgttgggtactgtctaaagtacttgatttattttttaaaaccttacaaaaaacttacaaggtaggtactgaaagattcagtaatttgttcaaagtcacacagcaaataagcaacagactctggatttgaaccaggcaatcctagagcctgtactgttagtaattatactttagcacctgtcaagaattcctgttgagtgtcaagaagcaancaccaagttaggatttaaagcaaacatgattgaagaatactgtggtgtggttgacagtagtgcctaagtctgttttcagagtgaaaaatgacaaattagattttaagtatggtttggagataatatcaggacagt

SEQ ID NO: 689 - DNA, 158 bp, Homo sapien
  misc_feature (1)...(158): n = A,T,C or G
tctcaacttantntnatacccacacccacccaanaacagggtttgttaggnattgtttgcattaataaattaaagctccatagggtcttctcgtcttgctgtgtcatgcccgcctcttcacgggcaggtcaatttcactggttaaaagtaagagacag

SEQ ID NO: 690 - DNA, 300 bp, Homo sapien
  misc_feature (1)...(300): n = A,T,C or G
tagaactcgtatttttaaacttctattctctanccttttccactacattatgacacaagaccctgcagaaagtcgtctggaaaatatcagaccatctcttacttgtcccatccaatcttacatcgaattatatgcacccttaaaaagttatttggagttttaaaaaactctattagcccaaattacctgaaataaactcctggcttgttcccctaatgtttataaaaaattgattgaaaatattcattttaaaaatgaagntcttgaatttatttaaattactgtcttgcagtgagttgg

SEQ ID NO: 691 - DNA, 305 bp, Homo sapien
ctgttcagaaagctcattggacctggttttgaaaataaaacaaagttaaaaccctgggaggagttattgtgcagtgtggagtactcaggctttcttataaagaaaaaaaaagttatctggtaccaaagtgtgcaacctacagaccctcaggtactgccctgtgacttctctgtatgacatcacaaggctgccaagtgcctgtttttctagaactaggagttggtgaggtttggctagtgctgaaaccatgcataggattggtttactaaattaaaaccttattacgtacgtcctccaaaagacag

SEQ ID NO: 692 - DNA, 582 bp, Homo sapien
caggaaatggataaccattttaactgtattttttgcagcccgtaccttcttgggaatacaattgtctaactttttatttttggtctggctgttgtggtgtgcaaaactccgtacattgctattttgccacactgcaacaccttacagatgtggaagatgtgaaatttgtcatcaattatgactaccctaactcctcagaggattatattcatcgaattggaagaactgctcgcagtaccaaaacaggcacagcatacactttctttacacctaataacataaagcaggtgagcgaccttatctctgtgcttcgtgaagctaatcaagcaattaatcccaagttgcttcagttggtcgaagacagaggtgcaggtaaggatgactgataggaaatgttggtagttacgagtcacatcgttgtctacaaatccatttaaatggtattggagggtgagtaaaaccttgaatgtgaaaacttaagctgaaaaattgtaaaaacatttcacgcctaccatgaatagatctgtttctttctgtccacaatgatttgtgtcatagacataattgatcaatttgcaattg

SEQ ID NO: 693 - DNA, 275 bp, Homo sapien
ccaattgatttgatggtaagggagggatcgttgacctcgtctgttatgtaaaggatgcgtagggatgggagggcgatgaggactaggatgatggcgggcaggatagttcagacggtttctatttcctgagcgtctgagatgttagtattagttagttttgttgtgagtgttaggaaaagggcatacaggactaggaagcagataaggaaaatgactatgagggcgtgatcatgaaaggtgataagctcttctatgataggggaagtagcgtcttg

SEQ ID NO: 694 - DNA, 397 bp, Homo sapien
  misc_feature (1)...(397): n = A,T,C or G
nggtctgcatttttattgcgatctgcagatgaactggaaaatctcattttacaacagaactgagacagacgaccaccatattcactgaggtctaaatttgcagtttccactaatgacattttgatttcccaacagagatacttctggtcttactgcacagtcttttaagagaaatacttccattatgccacattgtccttgatccgtaagtgatgtgttaaggtgcttcaaaggaactctgacctctgaagtacttgagctactttagtatgtccagcctattgctttttgttttagtgtgtcaccataaatatcaggggcataaaaggctatctattcttaattcaaggataaaacagaagaagcttgtggtataaaacaatagttcaagatccag

SEQ ID NO: 695 - DNA, 609 bp, Homo sapien
  misc_feature (1)...(609): n = A,T,C or G
ctgagcttccatttgtcagctagcactgnggtagtcaaccatgcgaatgaggctattttggacctcatgattgtccagtgcctgggctgataccgngggaaacgaaattttgtggctgcccacaaaatcatggaaaataatgattttttagaaaacctccactgntttgttgtgcagcaataaataactgaaacaccaatccaaaaaacttataaagctataacaattaaaacagnataataatagtnccgggatacaaaaatggtcaaattgaagaggatacaaagcctcaaagcagtcctcactcataananccttgttgtatcactaaaanggcattaaaattgagaanaaggaanaactagtggattaattaataaatgagaagtatccataaggaaaaattaaaattnnattcttgcttcacattatgaaaaaatacaaacaacagattgattaaagacttaaatgngatcaacaaaatgttaaaactgtgataagaacatttaagaaaatagttctatnaccctgggataaaacattttcntccaaggcattaaagtgttaaatgaaaagactgatncatttattcattagaatttaaattcn

SEQ ID NO: 696 - DNA, 300 bp, Homo sapien
ctgcaaaataagcgtgctaaattaaattgtcttaaggtttttccacttcattttgtgactttgtgtggttcgaatttctcagtattttaaccagtgtgttgatgttaaagtcaaaggctgcagtatgtctatattcttgctgtactcattggtagtttcagtatatgtaatgtgagtttaaatagtgaaattgtatctcatattaacatttcaaatgctcatattgaaaatggaaaatagtaaacacgggaattgattttattctggttgtctataatacttcattttaaatgtaaatgg

SEQ ID NO: 697 - DNA, 391 bp, Homo sapien
  misc_feature (1)...(391): n = A,T,C or G
nngtcatgtntgatgnatctgancaggttgctccacaggtagctctaggagggctggcaacttagaggtggggagcagagaattctcttatccaacatcaacatcttggtcagatttgaactcttcaatctcttgcactcaaagcttgttaagatagttaagcgtgcataagttaacttccaatttacatactctgcttagaatttgggggaaaatttagaaatataattgacaggattattggaaatttgttataatgaatgaaacattttgtcatataagattcatatttacttcttatacatttgataaagnaaggcatggttgtggttaatctggtttatttttgntccacaagttaaataaatcataaaacttgaacaaaaaaaaa

SEQ ID NO: 698 - DNA, 536 bp, Homo sapien
  misc_feature (1)...(536): n = A,T,C or G
ctgagcatacagcaataaaaataacataatttttatgtgtacaatatttatggaatacgttactggaacagataaataatttagttaataacatgacaaagaacagaaattgtatacactatacagcatagtaatagaataatgaatgattaaagttattaatattaggtagaaaatgaagggtatctttgagagcagaactcaaggaagcaagcaatttgccttatgaggaaagagttacctgtggataaaggagaaactgaaaaatttacaagtcaagactttttgagcaaagacaaaaatatgactatgagtcaccaattcagtacagtgaaaaaaaagttgaagagatatcttggaagtaaaccatgttgtggaagagcagggttttgataatcatgggattattctgaatgaattttaaatgcgataggaatatatgagataatttcaccagagaataatatgatcatgtttgcatttcaaaggggtgtatctggtgcactgngtagaataaataggntatgtgagcaagt

SEQ ID NO: 699 - DNA, 419 bp, Homo sapien
  misc_feature (1)...(419): n = A,T,C or G
ngtccacctgagggcaggtgacaaggacctgacagagcccatgcagggctttagatttggacacacaagagttgataacttcctcatgaactccttgcctgatctaaactcatattatgggttctgactgtttgagtaatcatcttcaaggttaaacctcttggcagttacccttttcacaaagtgcacagtgggaatcgagaatcgatagggttaattttggagcagtggcttataccattcacctctgtttttttgtgattatttcacagataatgagaccttaataacaaataggcgtaaaaaaattttcacattgaaatgatagaaacatttgatgtaataaaacttggttggcttgatattttaaggaattgaaacctagcaatcttattggagagacaagaattggtctccag

SEQ ID NO: 700 - DNA, 336 bp, Homo sapien
ccacttattgtccttaaaaatccatactgatacatggacagtaagtgtgttttcagatggagtaccagcaccgaaaatgggttgagggaggatgggttgtatgtatgtttctgcccactaattttgagcagccatattatgaattaaatcgtcacagccaagtaataacccaagaatggtatgagtttcatgtgtaatagctcaaatggaataagcatgaatgctggagtggaccattatcctcaaatattctatgtcacttctcatttaaagactcttgttatgaactattagaaactttaggcaaaatcaaaagtatttgcggcaaaataaagg

SEQ ID NO: 701 - DNA, 418 bp, Homo sapien
ccatgtgatgatgttgacaacccctgaagagcctcagtccattgttccacgtttaagaactaggaataccaggactgatgcaattctactgggtcactatcgcttgtcacaagacacagacaatcagaccaaagtatttgctgtaataactaagaaaaaagaagaaaaaccacttgactataaatacagatattttcgtcgtgtccctgtacaagaagcagatcagagttttcatgtggggctacagctatgttccagtggtcaccagaggttcaacaaactcatctggatacatcattcttgtcacattacttacaaatcaactggtgagactgcagtcagtgcttttgagattgacaagatgtacacccccttgttcttcgccagagtaaggagctacacagctttctcagaaagg

SEQ ID NO: 702 - DNA, 261 bp, Homo sapien
  misc_feature (1)...(261): n = A,T,C or G
gggcctgttgtgggggtgggggaagcagggaggggaacagctaaataggttgctgttgatttggttaaaaaatagtagggggatgatgctaataattaggctgngggtggttgtgttgattcaaattatgtgttttttggagagtcatgtcagtggtagaaatataattgttgggacnattagntttagcattggagtaggtttaggttatgtacgtagtctaggccatatgtgttgganattgagactagtagggctagg

SEQ ID NO: 703 - DNA, 261 bp, Homo sapien
  misc_feature (1)...(261): n = A,T,C or G
gggcctgttgtgggggtgggggaagcagggaggggaacanctaaataggttgctgttgatttggttaaaaaatagtagggggatgatgctaataattaggctgngggtggttgtgttgattcaaattatgtgttttttggagagtcatgtcagtggtagtaatataattgttgggacnattagntttagcattggagtaggtttaggttatgtacgtagnctaggccatatgtgttggagattganactagtagggctagg

SEQ ID NO: 704 - DNA, 381 bp, Homo sapien
  misc_feature (1)...(381): n = A,T,C or G
ngtntgaattctattaaagatacaaagaggagctggtaccatttcttctgaaactattacaaacaactgaaaaggtggaatttctccctaattcattttaggaggccagcattatactgataccaaaacctggcagaggtacaataataaaaggaaacttcaagtcagtatcactgatgaacaccaatgtgaaaatcctcaataaaatactggcaaactgaattcagcagcacatcaaaaagctaatccaccacaatcaagtcagcttcatccctgcgatgcaagtctggttcaacatatgcaaatcaataaatacaattcatcagataaacagagctaaagacaaaattcacatgattttctcaatagatgcagaaaagg

SEQ ID NO: 705 - DNA, 477 bp, Homo sapien
ctgaaccctcgtggagccattcatacaggtccctaattaaggaacaagtgattatgctacctttgcacggttagggtaccgcggccgttaaacatgtgtcactgggcaggcggtgcctctaatactggtgatgctagaggtgatgtttttggtaaacaggcggggtaagatttgccgagttccttttactttttttaacctttccttatgagcatgcctgtgttgggttgacagtgagggtaataatgacttgttggtgattgtagatattgggctgttaattgtcagttcagtgttttaatctgacgcaggcttatgcggaggagaatgttttcatgttacttatactaacattagttcttctatagggtgatagattggtccaattgggtgtgaggagttcagttatatgtttgggattttttaggtagtgggtgttgagcttgaacgctttcttaattggtggctgcttttagg

SEQ ID NO: 706 - DNA, 266 bp, Homo sapien
  misc_feature (1)...(266): n = A,T,C or G
ccatggctaggtttatagatagttgggtggttggtgtaaatgagtgaggcaggagtccgaggaggttagttgtggcaataaaaatgattaaggatactantataagagatcaggntcgtcctttagtgttgtgtatggctatcatttgttttgaggntagtttgattagtcattgttgggtggtaattagtcggttgttgatgagatatttggaggtggggatcaatagagggggaaatagaatgatcagtactgcggcgggtagg

SEQ ID NO: 707 - DNA, 358 bp, Homo sapien
  misc_feature (1)...(358): n = A,T,C or G
ccatcagagaaatgcaaatcaaaaccacaatgagataccatctcacaccagttagaatggcaatcattaaaaagtcaggaaacaacaggtgctggagaggatgtggagaaataggaacacttttacaccgntggtgggactgtaaactagttcaaccattgtggaagtcagtgtggcgattcctcaaggatctagaactagaaataccatttgacccagccggccaatattcaacattcttaaaggaaagaattttcaacccagaatttcatatccagccaaactaagcttcgttagtgaaggagaaataaaatactttacagacaagcaaatactgagagattttgtcaccaccagg

SEQ ID NO: 708 - DNA, 491 bp, Homo sapien
  misc_feature (1)...(491): n = A,T,C or G
cctactatgggngttaaattttttactctctctacaaggttttttcctagtgtccaaagagctgttcctctttggactaacagttaaatttacaaggggatttagagggttctgtgggcaaatttaaagttgaactaagattctatcttggacaaccagctatcaccaggctcggtaggtttgtcgcctctacctataaatcttcccactattttgctacatagacgggtgtgctcttttagctgttcttaggtagctcgtctggtttcgggggtcttagctttggctctccttgcaaagttatttctagttaattcattatgcagaaggtataggggttagtccttgctatattatgcttggttataatttttcatctttcccttgcggtactatatctattgcgccaggtttcaatttctatcgcctatactttatttgggtaaatggtttggctaaggttgtctggtagtaagggnggagtgggtttg

SEQ ID NO: 709 - DNA, 460 bp, Homo sapien
  misc_feature (1)...(460): n = A,T,C or G
nggttttttttgtagagcaaataatttatgcaaaatatgttacaaaatctgggatgctaaatagttgacacaagtactgtgtttgacatttagtttcatttgaattagtaatagaatttgctccttccaacatttacatcttttttctttctgactttatatattttcaataaaaatttgctccacagtttttaagntcattcttcttgaatccgnttttacatttgctgngacaaacctgcataaaactagattttatagatataacttctttggaagagataaaaattcaaaagtttgacattgctttcanttattcttttcttcattgttttgattggcccctgttagattgatgtattgccaatctacttttgatggcatgaatntaaaatgacaacataaaaagcncttctagtgcaacagtaattgaaacttgcagttttccattaaaaaaaaa

SEQ ID NO: 710 - DNA, 542 bp, Homo sapien
  misc_feature (1)...(542): n = A,T,C or G
ctgttacagtgacaagagataaaaagatagacctgcagaaaaaacaaactcaaagaaatgtgttcagatgtaatgtaattggagtgaaaaactgtgggaaaagtggagttcttcaggctcttcttggaagaaacttaatgaggcagaagaaaattcgtgaagatcatagatcctactatgcgattaacactgtttatgtatatggacaagagaaatacttgttgttgcatgatatctcagaatcggaatttctaactgaagctgaaatcatttgngatgttgtatgcctggtatataatgtcagcaatcccaaatcctttgaatactgtgccaggatttttaagcaacactttatggacagcagaataccttgcttaatcgtagctgcaaagtcagacctgcatgaagttaaacaagaatacagtatttcacctactgatttctgcaggaaacacaaaatgcctccaccacaagccttcacttgcaatactgctgatgcccccagtnaggatatctttgttaaattgacaacaatggacctg

SEQ ID NO: 711 - DNA, 394 bp, Homo sapien
  misc_feature (1)...(394): n = A,T,C or G
caaacccactccaccttactaccagacaaccttagccaaaccatttacccaaataaagtataggcgatagaaattgaaacctggcgcaatagatatagtaccgcaagggaaagatgaaaaattataaccaagcataatatagcaaggactaacccctataccttctgcataatgaattaactanaaataactttgcaaggagagccaaagctaagacccccgaaaccagacgagctacctaagaacagctaaaagagcacacccgtctatgtagcaaaatagtgggaagatttataggnagaggcgacaaacctaccgagcctggtgatagctggttgtccaagatagaatcttagttcaactttaaatttgcccacagaaccctctaaatccc

SEQ ID NO: 712 - DNA, 552 bp, Homo sapien
  misc_feature (1)...(552): n = A,T,C or G
gaggtctgtanaatgccaggctcaaatttgtctttataatttaataccagaaatctttcccttgtgatgtttctttctttctggattgcctctatagcaggggatagcgggggaggataaggcacatctttgntgtactgagaaatttgaccacgcaggatgatgtggctgttctcattcatctgcacagagaaaaataatgataaaatatccctttcctatgtttactgattttatggctgccataatggaagcctccttgactatttaatcctttctgtcaactaggttcgattttttttttaatttacctgttagaggtatttaanaattttaactagctanaaataattacattccaaaggaacaccaaggcaaataaatggttggtaatcagcaaaagaattacattagttgttgntgctacttattagggggagaactgtttttttttaaatttaaacaatttaataatctcaactgcaaataattttagatgcagcaaaggactatgtagncgttaatacctcatgttgatattttcataatatt

SEQ ID NO: 713 - DNA, 518 bp, Homo sapien
  misc_feature (1)...(518): n = A,T,C or G
ccaaaaactggaagcagctcactaaacaaacagtggcatacccatagaactgcatacttctcagcagtatgaaagaatgagctacttatataagcatcattgataaacctcaaaaaaaaaatgccacatgaanaaacccaaagggganaaacataaaaactttatatgtcagtcatataaaattctanaaaatgcaaactaatccatcntaaaggaaagtaaatcaacagttgtctggaggaccananagagcaggaggaganagattattaaaggggttaaagtaaatttgggagtgcccttccntttttaaatnctatgaaaatgaaagtaaaggcncatgcatgttgtaaactaatagtaacaaacanaatgggttggagtggggtgttgtctggggacatcattacaaaatgtaagccagtttatntaaattttgaaaagaccgtggactctgatctgactgatnaatgttggaagagataagtgtgctgcaaatgggggaattaataaaacag

SEQ ID NO: 714 - DNA, 281 bp, Homo sapien
ccaattgatttgatggtaagggagggatcgttgacctcgtctgttatgtaaaggatgcgtagggatgggagggcgatgaggactaggatgatggcgggcaggatagttcagacggtttctatttcctgagcgtctgagatgttagtattagttagttttgttgtgagtgttaggaaaagggcatacaggactaggaagcagataaggaaaatgactatgagggcgtgatcatgaaaggtgataagctcttctatgataggggaagtagcgtcttgtagacc

SEQ ID NO: 715 - DNA, 443 bp, Homo sapien
cttgaaatcagcaacacacttacaaatgagaaaatgaaaatagaagagtatataaagaaagggaaagaggattatgaagagagtcatcagagagctgtggctgcagaggtatccgtacttgaaaactggaaggagagtgaagtgtataagctacagatcatggagtcacaagcagaagcctttctgaagaagctggggctgattagccgtgatcctgcagcatatcccgacatggagtctgatatacgttcatgggaattgtttctttctaatgttacaaaagaaattgagaaagcaaagtctcagtttgaagaacaaattaaggcaattaaaaatggttcccggctcagtgaactttctaaagtgcagatttctgagctttcatttcctgcctgtaacacggttcatcccgagttactccctgagtcttcaggccacgatgg

SEQ ID NO: 716 - DNA, 639 bp, Homo sapien
  misc_feature (1)...(639): n = A,T,C or G
ccaaanaaaatgaagtacagagtctgcatagtaagcttacagataccttggtatcaaaacaacagttggagcaaagactaatgcagttaatggaatcagagcagaaaagggtgaacaaagaagagtctctacaaatgcaggttcaggatattttggagcagaatgaggctttgaaagctcaaattcagcagttccattcccagatagcagcccagacctccgcttcagttctagcagaagaattacataaagtgattgcagaaaaggataagcagataaaacagactgaagattctttagcaagtgaacgtgatcgtttaacaagtaaagaagaggaacttaaggatatacagaatatgaatttcttattaaaagctgaagtgcagaaattacaggccctggcaaatgagcaggctgctgctgcacatgaattggagaagatgcaacaaagtgtttatgttaaagatgataaaataagattgctggaagagcaactacaacatgaaatttcaaacnaaatggaagaatttangattctaaatgaccaaaacanagcattaaaatcagaagttcagaagctgcagactcttgtttctgcacangcctaataaggatgntgnggaacaaatggaaaaattg

SEQ ID NO: 717 - DNA, 473 bp, Homo sapien
  misc_feature (1)...(473): n = A,T,C or G
nntgaggctactgctgttttattacaacattacctcttgtttttataaagtgtaccaagatttaaattgataactttattttacttgaaaaaaaaaagtttnttttatcaccagtgttacagttgtcttctgtttctttttgttttgntttatttgntttcctttttagccaaagagtgaacagaanattttcttattttggtggctattcattttacttttaaaagtgattggtggattttagactaattatgggggaatttgccaccaaaataaaaaatatgtaaagngtagtgattacagagtggttaaaatgtgggttagtacttatttattccattaattgattatttgactgtttataaagaaagttgctttatttctttaaacatcttcaaaagatgatcctttcttgtcacattatagccaaaagaagcagagaacttcactgtctgcatttggttcctggttgg

SEQ ID NO: 718 - DNA, 207 bp, Homo sapien
ggtaaatgctagtataatatttaccatctcacttctaggaatactagtatatcgctcacacctcatatcctccctactatgcctagaaggaataatactatcactgttcattatagctactctcataaccctcaacacccactccctcttagccaatattgtgcctattgccatactagtctttgccgcctgcgaagcagcggtagg

SEQ ID NO: 719 - DNA, 255 bp, Homo sapien
  misc_feature (1)...(255): n = A,T,C or G
cctatattacggatcatttctctactcagaaacctgaaacatcggcattatcctcctgcttgcaactatagcaacagccttcataggctatgtcctcccgtgaggccaaatatcattctgaggggccacagtaattacaaacttactatccgccatcccatacattgggacagacctagttcaatgaatctgaggaggctactcagtagacagncccaccctcacacgattctttacctttcacttcatcttgcc

SEQ ID NO: 720 - DNA, 455 bp, Homo sapien
  misc_feature (1)...(455): n = A,T,C or G
ccaatgtcgaaacctacaagatttccttaaaatctctaatagaggcattacttgctttcaattgacaaatgatgccctctgactagtagatttctatgatccttttttgtcattttatgaatatcattgattttataattggtgctatttgaanaaaaaaatgtacatttattcatagatagataagtatcaggtctgaccccagtggaaaacaaagccaaacaaaactgaaccacaaaaaaaaaggctggtgttcaccaaaaccaaacttgttcatttagataatttgaaaaagctccatagaaaaggcgtgcagtactaagggaacaatccatgtgattaatgnttncattatgttcatgtaanaagccccttatttttagccataattttgcatactgaaaatccaataatcagaaaagtaattttgccacattatttatnaaaaatgttcc

SEQ ID NO: 721 - DNA, 530 bp, Homo sapien
  misc_feature (1)...(530): n = A,T,C or G
ccagtgcttgctgccgtggtttagtgattgggtgttagaaataaaaactcaggtctatttcttaccagtcagtaacaatttttagagaatgtacttggtatataatatatggacttcaggaactttattggggnggggggttaattttgccttaccctgttcactttcagatgattaggcttttgcactttagaatgagaaacttgtgacgttagtgtgttcttactagctttaatttgtatgtagcaatgaattgtgaatcttagtgcagtgggtttttttaaaaaactcaaaaagctgggaattaagtggtttcagtaataatgctataccgaggtgcttgcattgtatttcataattttgttacaaaccaaaattatttttaatganaacggtcttgggttcagaggtgtgatgccagaatgtattttcgtactgttaggcccttggaacagataccggtgctttcttgaaagatgaaagaaatgcaatgggtgctcttcatgcaaggttgcaaacctaccaagaat

SEQ ID NO: 722 - DNA, 242 bp, Homo sapien
  misc_feature (1)...(242): n = A,T,C or G
ccaagggtcatgatggcaggagtaatcanaggtgntcttgtgttgtgataagggnggagaggttaaaggagccacttattagtaatgttgatagtagaatgatggctagggtgacttcatatgagattgtttgggctactgctcgcagtgcgccgatcagggcgtagtttgagtttgatgctcatcctgatnagaggattgagtaaacggctaggctagaggtggctagaataaataggagg

SEQ ID NO: 723 - DNA, 472 bp, Homo sapien
  misc_feature (1)...(472): n = A,T,C or G
cctactatgggtgttaaattttttactctctctacaaggttttttcctagtgtccaaagagccgttcctctttggactaacagttaaatttacaaggggatttagagggttctgtgggcaaatttaaagttgaactaagattctatcttggacaaccagctatcaccaggctcggtaggtttgtcgcctcnacctataaatcttcccactattttgctacatagacgggtgtgctcttttagctgttcttaggtagctcgtctggnttcgggggtcttagctttggctctccttgcaaagttatttctagttaattcattatgcagaaggtataggggttagtccttgctatattatgcttggttataatttttcatctttcccttgcggtactatatctattgcgccaggtttcaatttctatcgcctatactttatttgggtaaatggtttggctaangttgtctggtag

SEQ ID NO: 724 - DNA, 292 bp, Homo sapien
  misc_feature (1)...(292): n = A,T,C or G
nccaccactgcagccctacatacagntgaaaaaaaattccattctgttaacatttgttttataagttttcacncaatacacaaaaaacccctctgcacttcttgtaaagaacaaaaaagatacacaacagttaagcgtaaagatcacaggcaatagcattcaaacatggatgtgggnagagaaaggagtacctggcatgagtacctgcttagttngactgaatccttgatttttaatttggcttttcatgggccgntcacaacaccaacgctgngngaggtatggtagtcag

SEQ ID NO: 725 - DNA, 122 bp, Homo sapien
  misc_feature (1)...(122): n = A,T,C or G
atagaaagggcatacccaaaatgttactgaaaatntaatacaaattccaagattcaccaangaagtaacaaaaacctggcctgcangnggncccctatcccgtggctccatggntgatgtgg

SEQ ID NO: 726 - DNA, 477 bp, Homo sapien
  misc_feature (1)...(477): n = A,T,C or G
ctgaaccctcgtggagccattcatacaggtccctaattaaggaacaagtgattatgctacctttgcacggttagggtaccgcggccgttaaacatgtgtcactgggcaggcggtgcctctaatactggtgatgctagaggtgatgtttttggtaaacaggcggggtaagatttgccgagttccttttactttttttaacctttccttatgagcatgcctgtgttgggttgacagtgagggtaataatgacttgttggtgattgtanatattgggctgttaattgtcagttcagtgttttaatctgacgcaggcttatgcggaggagaatgttttcatgttacttatactaacattagttcttctatagggtgatagattggtccaattgggtgtgaggagttcagttatatgtttgggattttttaggtagtgggtgttgagcttgaacgctttcttaattggcggctgcttttagg

SEQ ID NO: 727 - DNA, 416 bp, Homo sapien
cctgtctttgaatggatgaaataggttaataaaaaacatcactgtttaaaaactagaacactgaaaaattctaggaaagcttattttcccttatatttttatggtactttcaacacttaataacactatttcaattaagttttctcctagagtttatagtatatcagtacattcttttctgtggatgcaataatatagaatcttattccaaatcttactggcaggttctcttaaattcttcaacggctgccatagtgattaaccaaaattagttatgatttctgcctatctgtgtgagaacttacaggggaaattgttctaaacctgaggaacatgaagtaactgtactgcacactccaaatgatgacagtcattttatatcaccttcaattacccaacagcttttaatagtctgg

SEQ ID NO: 728 - DNA, 416 bp, Homo sapien
  misc_feature (1)...(416): n = A,T,C or G
cctgtctttgaatggatgaaataggttaataaaaaacatcactgtttaaaaactagaacactgaaaaattctaggaaagcttattttcccttatatttttatggtactttcaacacttaataacactatttcaattaagttttctcctagagtttatagtatatcagtacattcttttctgtggatgcaataatatagaatcttattccaaatcttactggcaggttctcttaaattcttcaacggctgccatagtgattaaccaaaattagttatgatttctgcctatctgtgtgagaacttacaggggaaattgttctaaacctgaggaacatgaagtaactgtactgcacactccaaatgatgacagtcattttatatcaccttcaattacccaacagcttttaatantctgg

SEQ ID NO: 729 - DNA, 564 bp, Homo sapien
  misc_feature (1)...(564): n = A,T,C or G
ctgtgagtagaggagtcttcccgagagtagcagttgttgatccaaatgattgaagccttcaggtaagggaataactgctgcaggaattctttcttgaagaatttaagctgtttggtaagaattctgtaactacatacctttgaaacactattcacattcaaataaacgcttgttttctagccaggcacaggctcaattagtttttcaaactctagccaaggcagtatttcatttgggaaatcatgcaacagaactgctcaattcttaacttctcctgctgttaacatttacacttagactgccagcaacagttaacttaaattttggtctcaagggaacaaaaaaaaattgcattcagaatttaatatagtattttaaaactaattttagcctgtaagncattatgagcaatagtaacttttatacctcctcatcttgnctgataatatattctatatgctgncaatctgattatatagtctatatgctagaagttgctgattttcattctgccaccaaaaaaaactgtccttttttttttatgggggaaaaagggaatttaaa

SEQ ID NO: 730 - DNA, 310 bp, Homo sapien
ccatttttatttcttcttcagagaagtgtttatttaggtctgttgcccattttacaattaggccatatgttttcttgctgttgagttgtatgtgtgtttgtataaattttgcatattaaccccttatcacacgtatgttttttaaaataaattttgcttattaatcttttatcagatgtatggtttccaaatatattcttccgatccatggattctcttttttgttatgattgtttctttgctcttcggaagctttttgttttgttttgttatttgttttactttgatatagtcccatttattgtttttg

SEQ ID NO: 731 - DNA, 467 bp, Homo sapien
  misc_feature (1)...(467): n = A,T,C or G
ngacaaccttagccaaaccatttacccaaataaagtataggcgatagaaattgaaacctggcgcaatagatatagtaccgcaagggaaagatgaaaaattataaccaagcataataaagcaaggactaacccctataccttctgcataatgaattaactagaaataactttgcaaggagagccaaagctaagacccccgaaaccagacgagctacctaagaacagctaaaagagcacacccgtctatgtagcaaaatagngggaagatttataggnagaggcgacaaacctaccgagcctggtgatagctggttgtccaagatagaatcttagntcaactttaaatttgcccacagaaccctctaaatccccttgtaaatttaactgntagnccaaagaggaacagntctttggacactaggaaaaaaccttgtagagagagtaaaaaatttaacacccatagtagg

SEQ ID NO: 732 - DNA, 492 bp, Homo sapien
  misc_feature (1)...(492): n = A,T,C or G
cctactatgggtgttaaattttttactctctctacaaggttttttcctagtgtccaaagagctgttcctctttggactaacagctaaatttacaaggggatttagagggttctgtgggcaaatttaaagttgaactaagattctatcttggacaaccagctatcaccaggctcggtaggtttgtcgcctctacctataaatcttcccactattttgctacatagacgggtgtgctcttttagctgttcttaggtagctcgtctggnttcgggggtcttagctttggctctccttgcaaagttatttctagttaattcattatgcagaaggtataggggttagnccttgctatattatgcttggntataatttttcatctttcccttgcggtactatatctattgcgccaggtttcaatttctatcgcctatactttatttgggtaaatggtttggctaaggttgtctggtagtgaggcggagngggtttggg

SEQ ID NO: 733 - DNA, 562 bp, Homo sapien
  misc_feature (1)...(562): n = A,T,C or G
ntgaaatggcaatagcattcactgtcgtattttgcagtgctcaggaagtgggacgttaactttgaaggtgcttgtttgtattagctctgctaggtttacctctacaacgtagatttcagcagctatgctgactgacactacattctagttcttaagattttttttccanatccccccttccccagctagacatacgtagcatactttcatcttattcagtctttctgtaacctgctgctgcttttagtcctcctcacctcagatcggaatcaatggagtgggcccagaggatacattttaattccagtaatggtaggtagatttgtcctgctttctaaaacatctcctcatttcatatttccactccatattgattccataagggaaaattaatgggtgnttcctcctttagggaggcaatgcaaagagngtggacatcttctaatcttgaggaacagtngttgatttcccttgaaggagcttacatattgactgtntttcacaataacctgnttgccccagntcaatccctcattttaatacttaatgttggtnctgggct

SEQ ID NO: 734 - DNA, 265 bp, Homo sapien
  misc_feature (1)...(265): n = A,T,C or G
nggtccagaacaagagaaataactgcagaaaacacatatggttggaaaccatgcgcttgtgactttttctgtagcctatgggagtggacagagtgggtaacccaagatgtttttaagactgactggactaagaatggcgtacttatagccaactacttcccccctaatgtgactgaagggattcataatgatcacaattagcattacggttaagtattttagggttgacgtctaagctcacacttgaaaggtatttatctaatgg

SEQ ID NO: 735 - DNA, 216 bp, Homo sapien
atttaatacgtgctcactgctcggcacgcgctgaagctacagttaacaatcagtgagcacatattaaatgataaaataatgctgatggtaaacattcataacagcagagtaagattttggcagttttgtgtctcggtaacataactgtaaccttagatgaacacctatcccttcatgatctgactttagaggcaaggagtttgtaacatctaatgg

SEQ ID NO: 736 - DNA, 285 bp, Homo sapien
  misc_feature (1)...(285): n = A,T,C or G
ctgaaaggcaacntggagactagttagtctagtcccctcatattataaattggtatgctgaggccaggcagtaaattgctatggagctctccaatttaaggccagtttgactccaagggtagggcttctagtaaaattttgtgattaaattggaaactctaatttatttttctatgngtttttggtacctaatcctcataagcaagccatatttcaaggctgatcaatgaaaacaccaaataccaaagcttcctttcccttccaaatttactgaccctttgtcag

SEQ ID NO: 737 - DNA, 509 bp, Homo sapien
  misc_feature (1)...(509): n = A,T,C or G
agangaagaagangaagattaagggaaaagtacatcggtcaagaagagctcaacaaaacaaagcccatctggaccagaaatcccgacgatattactaatgaggagtacggagaattctataagagcttgaccaatgactgggaagatcacttggcagtgaagcatttttcagttgaaggacagttggaattcagagcccttctatttgtcccacgacgtgctccttttgatctgtttgaaaacagaaagaaaaagaacaacatcaaattgtatgtacgcagagttttcatcatggataactgngaggagctaatccctgaatatctgaacttcattagaggggtggnagactcggaggatctccctctaaacatatcccgtgagatgttgcaacaaagcaaaattttgaaagttatcangaagaatttgggtcaaaaaatgcttanaactctttactgaactggcggaagatnaagagaactncaaganattctatgagcagntctctt

SEQ ID NO: 738 - DNA, 97 bp, Homo sapien
cagtgaattgaatacgactcctatagggcgaattgggccctctagatgcatgctcgagcggccgccagtgtgatggatatctgcagaattcgccctt

SEQ ID NO: 739 - DNA, 209 bp, Homo sapien
  misc_feature (1)...(209): n = A,T,C or G
ccgncagtgtgatggatatctgcagaattcgcccttagcggcccgcccgggcagggtccttatatatagtagcttagtttgaaaaaatgtgaaggactttcgtaacggaagtaattcaagatcaagagtaattaccaacttaatgtttttgcattggactttgagttaagattattttttaaatcctgaggactagcattaattgacgg

SEQ ID NO: 740 - DNA, 164 bp, Homo sapien
ccaagctaatgggtgacactgtgaatgcaactctaatgcagcctggcgtaaatggtcctatgggcactaactttcaagttaacacaaacagaggaggtggtgtgtgggaatctggtgcagcaaactcccagagtacatcatggggaagtggaaatggcgcaaat

SEQ ID NO: 741 - DNA, 514 bp, Homo sapien
  misc_feature (1)...(514): n = A,T,C or G
ccagtcagaattgagatgtgctgtgagtgcaaaatacactcaaatctaagacttagtatggaagaaaaagaagataaggtgnttcattaataatcttttatattgattacatgttgaaatgatatttttaatatactgggttacataaactgttattaagattaattttgcttgtttcttttttaatatggctactagaaaattaaaaattatgttgtggttcacattatatttctgttgaacaatgtggacatagataatctacagtcattacattagccttagaatttagcatcatacttttaagcactctggggtactaacttgaactcccagaaacccataagcacactctgcatataaattattgcaaaattcattcttatctctctgaaagatatgcattttaagggtaaaaagaattcacaaaatattgantccttaacaaatgtcaattagtatatggagagagctaaaggacttcntgtagactggtncattggggaaaaacaga

SEQ ID NO: 742 - DNA, 439 bp, Homo sapien
  misc_feature (1)...(439): n = A,T,C or G
gcaggtcctatgcatagttaataagggntataatctactcaacatggaaaatgggagcctatttgcaaacacacgagtaattaaagtaccaattctctcttagtttctttttttatagttggnttattttgcaattataaatgntaaacatccctagagatgaaagttaaaatggctgatcacagatcagtagcaaaatacaaattgacaattcaaaattataaataaaactctgttgaggatgtttaactttgagcctccaaatttaagagctaagcttggaagaaacaaatttataggttatatttccctcttaaattaaaaaacaaacttcctctggcagtagnttgtgaattcctttcattgnaatgataccatgattacaggatcaaaaatgcttaacttacttgccattctgctcacatcatcacagttgttt

SEQ ID NO: 743 - DNA, 275 bp, Homo sapien
  misc_feature (1)...(275): n = A,T,C or G
cangacgctacttcccctatcatagaagagcttatcacctttcatgatcacgccctcatagtcattttccttatctgctccctagtcctgtatgcccttttcctaacactcacaacaaaactaactaatactaacatctcagacgctcaggaaatagaaaccgtctgaactatcctgcccgccatcatcctagtcctcatcgccctcccatccctacgcatcctttacataacagacgaggtcaacgatccctcccttaccatcaaatcaattgg

SEQ ID NO: 744 - DNA, 295 bp, Homo sapien
  misc_feature (1)...(295): n = A,T,C or G
ctgtncttttaaaaaatctggatgttttttatttagtgattgttcgacaattagctgcttcaaaacataatgtgcattgcttatgaatgccttcatatactaatacagatactctgataatattacactctaataaggataatgctgaattttgaaaggacacaaaacatctaatgccaatatatacatgattagccaacatctttgctatcaagaccactcgtttttaaataaagatgcaagtgtcagttgtagattattgggatgaagctaaatccccagaatgcagcagcag

SEQ ID NO: 745 - DNA, 477 bp, Homo sapien
  misc_feature (1)...(477): n = A,T,C or G
cgcgttactgtacatattgctagcaggagacaactggaaatactaaacaaatactggaattcacattacagacagacgaaaccaacatggatgccacacataacttcctttgtagtttcacagagagcctatttgtggttgctcaggtggggtcatacattgcttgcagaaatggcctgatcatagctctatgaaacaatgaattcggaatgaaatcttaccatgacacctctctgtaggaaagaaatgttgcttcacgtgtgctaagttgagataataatatttcacatatttatatacagagaatcactctcaaatttaacccaagataagcaataggatttgggggtgacttgtacacatttctaacaacacttttcttttttctagaggtcactctcaaacactgatatatcactatagtttgagtgtanggattcagtaatcaaaggttgttattgcaaaagagccaggcag

SEQ ID NO: 746 - DNA, 524 bp, Homo sapien
  misc_feature (1)...(524): n = A,T,C or G
ctgtgaaattgggttgggagagccaaaatactttacaacttcagaccggagaaaaggccagaggtgtgaagttagactctatgatgaaacagagtcgtcttttgcgatgacatgttgggataatgaatccattctacttgcacagagctggatgccacgagaaacagtaatatttgcctcagatgtaagaataaattttgacaaatttcggaactgcatgacagcaactgtaatctcaaaaaccattattacaactaatccagatataccagaagctaacattctgctgaattttatacgagaaaataaagaaacaaatgttctggatgatgaaattgacagttatttcaaagaatccataaatttaagtacaatagttgatgtctacacagntgaacaattaaagggaaaagctttgaagaatgaaggaaaagctgatccttcctatggcatcctttatgcctacatttccacactcaacattgatgatgaaactcaaaagtagttcgaaatagatgttccag

SEQ ID NO: 747 - DNA, 456 bp, Homo sapien
  misc_feature (1)...(456): n = A,T,C or G
cctcagttcttgattgtggttgacggggcgtcaccatgaaggagcccatttagtataaagcttccaaccttttctcttaatcgtttctttaatcttttaaaccatcttcaagtgcataggggagtttccgatgccagaggatgaaagcaagtgctttctccaccctctcctcccagagtgaaaacaaatccttttgctgatacttgtttcaaaagcatccattgtaaagcttctcagtgacacaaaatactgagaggtaactttttatcaatcaaaccacataccccaatttaacacctttcagtgctctgaattcaactgacagactaaagggtgtttcctgtaacagtctgaaatattaagtgttttttttgttttgtttttaaatcttatttcagaaaacttcctctnggggtaggaaagtacacatgaagcagcaaagtaacgaagaaaaac

SEQ ID NO: 748 - DNA, 474 bp, Homo sapien
  misc_feature (1)...(474): n = A,T,C or G
ccanaccagggaaccaaatgcagacagngaagttctctgcttcttttggctataatgngacaagaaagggatcatcttttgaagatgtttaaagaaataaagcaactttctttataaacagtcaaataatcaattaatggaataaataagtactaacccacattttaaccactctgtaatcactacactttacatattttttatttnggnggcaaantcccccataattagtctaaaatccaccaatcacttttaaaagtaaaatgaatagccaccaaaataagaaaatcttctgttcactctttggctaaaaaggaaaacaaataaaacaaaacaaaaagaaacagaagacaactgtaacactggtgataaaagaaactttttttttacaagtaaaataaagttatcaatttaaatcttggncactttataaaaacaagaggtaatgttgtaataaaacagcagtagcctcag

SEQ ID NO: 749 - DNA, 355 bp, Homo sapien
  misc_feature (1)...(355): n = A,T,C or G
cctgggtnnagnggctgactgnaacctccacttcctgttctcaggcaatcctcctgcctcagcctccttagtagctgggactacaggagtgtgcaaccatgcccaactaatttttgtatttttaatagagacagggtttcaccatgttgatcaggttggtctccaactcctgacctcaggtgatccacctgtcccagcctcccaaagtgctgggattacaggcatgagccaccacgcccggnccaggataaagtaaaaatttgtaagcacacaaggccctttgcaacctggctcctggttactactttaancctcctgccctcccaaatgtnctcactgtttttctanacatacc

SEQ ID NO: 750 - DNA, 493 bp, Homo sapien
  misc_feature (1)...(493): n = A,T,C or G
ccatgctggtctcgaactcctgaactcaggtgatccacccgcctcagtctcccaatagattacatatattattaatgaattgcttcctttaacaccctattcattgaattttccagtaaaccacaattactaattactcctgaaatcagaaaagaggttaaaaagattttataacagtatcctatgaaatctactactttcaagtaatagtagttgaattaccaaaacccgtcactcaagccaatgactacaattaagatatgagtaacatttcctagataaataaagtcaattaattatatttgcatctgggaaatagagaaagtacatataagccatgattttgaagncaaaagagagagantatttgccaaggaggggtgagttatagtatgtaattataacatacagaagctttttgtatgctggtaactaattttaatttcctacattnttatggagatttctgctattcttgtcctattttccacct

SEQ ID NO: 751 - DNA, 364 bp, Homo sapien
  misc_feature (1)...(364): n = A,T,C or G
cgaggtctggnaaggtcaccaagtctgcccaganagctcagaaggctaaatgaatattatccctaatacctgccaccccactcttaatcagtggtggaagaacggtctcagaactgtttgtttcaattggccatttaagtttagtagtaaaagactggttaatgataacaatgcatcgtaaaaccttcagaaggaaaggagaatgttttgnggaccactttggttttcttttttgcgtgtggcagttttaagttattagtttttaaaatcagtactttttaatggaaacaacttgaccaaaaatttgtcacagaattttgagacccattaaaaaagttaaatgagataaaaaaaaaaaancntg

SEQ ID NO: 752 - DNA, 498 bp, Homo sapien
  misc_feature (1)...(498): n = A,T,C or G
ctggattatgggttggnattggtcatatgttagactccatacaggcatagctatgatgcagtgaatcccttagaagttacaattctcaaattacatacttcctcagatgtaacattagaactcaatatttctaacaataacataccagaaaaggctggactggcactcatctgctgactaacttgtagcctcagtaatatgacatacttgcctttaacaaattatctcaaattaactaacagaccttcagaaaatggagattctttttgatggggacataatcaaatttaagtctgagaaatatgcttaacagttggaactcaaattaaatgtactgattttaaagtttagacattaacaagtgatanattagcctcaaaaaaagacaatttggnaaggnttaggtcttttaatttggtgcttgntcacaacttgactggtgcttctttccttgctgcttcacatcaagcatggggccaattctattttcagtaaatg

SEQ ID NO: 753 - DNA, 467 bp, Homo sapien
  misc_feature (1)...(467): n = A,T,C or G
nacaaccttagccanaaccatttacccaaataaagggataggcgatagaaattgaaacctggcgcaatagatatagnaccgcaagggaaagatgaaaaattataaccaagcataatatagcaaggactaacccctataccttctgcataatgaattaactagaaataactttgcaaggagagccaaagctaagacccccgaaaccagacgagctatctaagaacagctaaaagagcacacccgtctatgtagcaaaatagtgggaagatttataggtagaggcgacaaacctaccgagcctggtgatagctggntgnccaagatagaatcttagntcaactttaaatttgcccacagaaccctctaaatccccttgtaaatttaactgttagtccaaagaggaacagctcttggacacnaggaaaaaaccttgcagagagagtaaaaaatttaacacccatagtagg

SEQ ID NO: 754 - DNA, 196 bp, Homo sapien
  misc_feature (1)...(196): n = A,T,C or G
gtcatgttcaagtgttntaatctgacgcaggcttatgcggaggagaatgttttcatgttacttatactaacattagttcttctatagggtgatagattggtccaattgggtgtgaggagttcagttatatgtttgggattttttaggcagtgggtgttgagcttgaacgctttcttaattggtggctgcttttagg

SEQ ID NO: 755 - DNA, 381 bp, Homo sapien
ctggaaaggattctgtacatataagacatcaaatattgagggatactggaacttttaaattaatgggcaaagaaagtcaacaaaggaagttcatatgaaatcaaactagtaatatgattacaaaaaaaaagtttaaaatttttcttggccccagtcttatcatttctgagccaaatacaattctatcgaaatcacctgaaactgaaatcaccattctaggctggttttcccataaagatggactgctccaaaaagaggaatcaagaaagaatttggctcacagtgaattattcactttgtcttagttaactaaaaataaaatctgactgttaactacagaaatcatttcaaattctgtggtgataataaagtaatgaccgc

SEQ ID NO: 756 - DNA, 341 bp, Homo sapien
  misc_feature (1)...(341): n = A,T,C or G
ggntataaacctattatttattgcagaactaataaaaaatccaaagccttgtatttgtacatctttattatctctaaagcactttcctcaacctaatttcagtttttacaattggtactcaagaaaatagagacagaaatcatttgattttgcccagaaaccatctgcttatatttataaggccacctaatttgaaatcacatatagaccaggcgcggtggctcacgcctgtaattccaacactttggaaggccaaggcaggtggatcacaaggtcaagagattgagaccatcttggccaacatggcgaaaccccgtctctaccaaaaatacaaaaatcag

SEQ ID NO: 757 - DNA, 479 bp, Homo sapien
  misc_feature (1)...(479): n = A,T,C or G
cgcnttactgtacatattgctagcagggagacaactggaaatactaaacaaatactggaattcacattacagacagacgaaaccaacatggatgccacacataacttcctttgtagtttcacagagagcctatttgtggttgctcaggtggggtcatacattgcttgcagaaatggcctgatcatagctctatgaaacaatgaattcggaatgaaatcttaccatgacacctctctgtaggaaagaaatgttgcttcacgtgtgctaagttgagataataatatttcacatatttatatacagagaatcactctcaaatttaacccaagataagcaataggatttgggggtgacttgtncacatttctaacaacacttttcttttttctagaggtcactctcaaacactgatatatcactatagnttgagngtagggattcaagtaatcaaaggttgttattgcaaaagagccaggcag

SEQ ID NO: 758 - DNA, 267 bp, Homo sapien
  misc_feature (1)...(267): n = A,T,C or G
ccatgnctaggtttatagatagttgggtgggttggtgtaaatgagtgaggcaggagtccgaggaggttagttgtggcaataaaaatgattaaggatactagtataagagatcaggttcgtcctttagtgttgtgtatggctatcatttgttttgaggttagtttgactagtcattgttgggtggtaattagtcggttgttgatgagatatttggaggtggggatcaatagagggggaaatagaatgatcagtactgcggcgggtagg

SEQ ID NO: 759 - DNA, 449 bp, Homo sapien
  misc_feature (1)...(449): n = A,T,C or G
cgaggtcttgaaatcagcaacacacttacaaatgagaaaatgaaaatagaagagtatataaagaaagggaaagaggattatgaagagagtcatcagagagctgtggctgcagaggtatccgtacttgaaaactggaaggagagtgaagtgtataagctacagatcatggagtcacaagcagaagcctttctgaagaagctggggctgattagccgtgatcctgcagcatatcccgacatggagtctgatatacgttcatgggaattgtttctttctaatgttacaaaagaaattgagaaagcaaagtctcagtttgaagaacaaattaaggcaattaaaaatggttcccggctcagtgaactttctaaagngcagatttctgagctttcatttcctgcctgtaacacggttcatcccgagttactccctgagtcttcaggccacgatgg

SEQ ID NO: 760 - DNA, 414 bp, Homo sapien
  misc_feature (1)...(414): n = A,T,C or G
ccatnaactggaagcagctcactaaacaaacagnggcatacccatagaactgcatacttctcagcagtatgaaagaatgagctacttatataagcatcattgataaacctcaaaaaaaaaatgccacatgaagaancccaagggggagaaacataaaaactttatatgncagncatataaaattctagaaaatgcaaactaatccatcntaaaggaaagtaaatcancagttgtctggaggaccanagagagcaggaggagagagattnttaanggggttaaagtaaattngggagtgcccttccatttttaaatnctatgaaaatgaaagtaaaggcccntgcatgttgtaaactaatagtaacaaacagattgggttggagtggggtgttgtctggggacatcattacaaan

SEQ ID NO: 761 - DNA, 428 bp, Homo sapien
gagcctcactaaaataacagatttcagtatagccaagttcatcagaaagactcaaatggaatgatttacaagatagaacactttaaaccaggtcagtcctatctttttgtagctgaaggctatcagtcataacacaatttcgcgtacacctctgctcattatggaattacacttaaaacgaatctcaagagggtgaccattgttgtttcagataccatccctaaggagagtggttaacaggaagattgccagtgttactgatggaaagaagtgtttgtttgttttttttcttgtcaaagacttacaccatagttttaaattaaactgtcaggcattttctcagacaggttttccttttcaatgcagtaatgaagaactaagataaaaatcatgacttttgactgccactcaacattattacatgcacc

SEQ ID NO: 762 - DNA, 574 bp, Homo sapien
  misc_feature (1)...(574): n = A,T,C or G
caggtctgaactgataagtattaagagacgtttgttgctagttaagngttccagttgagagttcgaagtgaaaacctgggctctttaccagtgttgagtgagaagatttatttctctttcctctgaatttaccacatgtaacatcacagagacatgtagagttcctttaggatttgcgatttgaaccagnccagtctgattttcaggtgaattctgtgaagagcttgatgggggaagtctgaagacagaaggaattagggaaaagggtgatacttacagagtaaaggaaataaatgaaaagataatggtatttttggtagccacagggaaatagcaggaggggactggagatcacacacacgcacacgcacacacacaaacacacacacacgctaaaactcaaactaaaaacctcccaaaggagctgctttgtttgcagacttcaattngaagtagatactaagggcaagaatagaccagttaaaattcacctgaaaatctcttcccanncttcaaatgtgctaaaatatcactgtcagcttagcatctctncatgtatgtatatatagatgta

SEQ ID NO: 763 - DNA, 465 bp, Homo sapien
  misc_feature (1)...(465): n = A,T,C or G
cctactatgggtgttaaaattttttactctctctacaaggntttttcctagtgtccaaagagctgttcctctttggactaacagttaaatttacaaggggatttagagggttctgngggcaaatttaaagttgaactaagattctatcttggacaaccagctatcaccaggctcggtaggtttgtcgcctctacctataaatcttcccactattttgctacatagacgggtgtgctcttttagctgttcttaggtagctcgtctggtttcgggggtcttagctttggctctccttgcaaagttatttctagttaattcattatgcagaaggtataggggttagtccttgctatattatgcttggatataatttttcatctttcccttgcggtactatatctattgcgccangtttcaatttctatcgcctatactttatttgggtaaatggtttggctaaggttg

SEQ ID NO: 764 - DNA, 151 bp, Homo sapien
ctgtcaattaatgctagtcctcaggatttaaaaaataatcttaactcaaagtccaatgcaaaaacattaagttggtaattactcttgatcttgaattacttccgttacgaaagtccttcacatttttcaaactaagctactatatttaagg

SEQ ID NO: 765 - DNA, 251 bp, Homo sapien
gaagagcttatcacctttcatgatcacgccctcatagtcattttccttatctgcttcctagtcctgtatgcccttttcctaacactcacaacaaaactaactaatactaacatctcagacgctcaggaaatagtaaccgtctgaactatcctgcccgccatcatcctagtcctcatcgccctcccatccctacgcatcctttacataacagacgaggtcaacgatccctcccttaccatcaaatcaattgg

SEQ ID NO: 766 - DNA, 375 bp, Homo sapien
  misc_feature (1)...(375): n = A,T,C or G
cgaggtctgncctcctggttcttcatccattattaacagaagagcatactggtttcggtccataaaatctttgggaagggacaactgtaaaggaagttcatagtcgtcaatatgaaggattttaatttctggctttcctatcttcttcttcaggatagcttccttcagcatagaattgttttccaatataaaatattttgctgggttgtccgtactatgtaggctgaccactgggacccttggaccttcacagaataataagaaatgttgattcatgggactaaaactggcatcaaaatatgtacattgttctttcatgaaattacatgaaatgcattggcgattcaataatccttcagtagaagcactgtacag

SEQ ID NO: 767 - DNA, 485 bp, Homo sapien
  misc_feature (1)...(485): n = A,T,C or G
cgaggtctgaaccctcgtggagccattcatacaggtccctaattaaggaacaagtgattatgctaccttngcacggttagggtaccgcggcccgttaaacatgtgtcactgggcaggcggtgcctctaatactggtgatgctagaggtgatgtttttggnaaacaggcggggtaagatttgccgagttccttttactttttttaacctttccttatgagcatgcctgtgttgggttgacagtgagggtaataatgacttgttggtgattgtagatattgggctgttaattgtcagttcagtgttttaatctgacgcaggcttatgcggaggagaatgttttcatgttacttatactaacattagttcttctatagggtgatagatnggtccaattgggtgtgaggagntcacttatatgtttgggattttttaggtaagngggtgttgagcttgaacgctttcttaattgggggctgcttttang

SEQ ID NO: 768 - DNA, 379 bp, Homo sapien
  misc_feature (1)...(379): n = A,T,C or G
ctgatattctattaaagatacaaagaggagctggnaccatttcttctgaaactattacaaacaactgaaaaggtggaatttctccctaattcattttaggaggccagcattatactgataccaaaacctggcagaggtacaataataaaaggaaacttcaagtcagtatcactgatgaacaccaatgtgaaaatcctcaataaaatactggcaaactgaattcagcagcacatcaaaaagctaatccaccacaatcaagtcagcttcatccctgcgatgcaagtctggttcaacatatgcaaatcaataaatacaattcatcagataaacagagctaaagacaaaattcacatgattttctcaatagatgcagaaaagg

SEQ ID NO: 769 - DNA, 518 bp, Homo sapien
  misc_feature (1)...(518): n = A,T,C or G
cgaggtccatatgatgatcagtctatatagtttaaggcgcagatacacaaattttcaaaaatatgggtagaatatagtcaatatgaatggaatagacaatgctttgaaaatcactggagggaggctttattgtttgtgaaaacatgttgtcatcactttttgctttaagcccttggtggtgaaataactcaaaccattcttccttatgctgaagatcgagaaccccaagtatcacatctaccatcccactcatcaatgtgattggtcagtctttgctgaggncctgcatagccagttttaaagttagagttcttgcatatacatatgaaaaggcatgttacttgtgctttcaaagagctttttgcttggtgtaaaaagaaaactcaaattacagtgtgatgtggaatataatggtggtagtttcatcgagatgatgggaaagaattgataagataaagcngaaagatgagcagaattttcagattgggtntggaaagagcacttaagaaagagggtgg

SEQ ID NO: 770 - DNA, 378 bp, Homo sapien
  misc_feature (1)...(378): n = A,T,C or G
tatgggtcctgagtgtggaatataagataacaagacaattcccttgctttcaagggaaatcacactttataaaactttgaattcttgaaatgggtttcagaggttccaaggtcaaattcaagaataagagttaagaagaaaaagactatgagaaaggaagtgntgaccccatttgcatttaaatggcaggaatagtctcaatctactcattggggaaaaatgtatgttgcatatttttgagatattgcaacttgctctctctctttgccaccccaccctttgncatgctctgtttttgggctgaattggcaagaaaaatggctggagggctggaagaagntggacccttcttccttcttccttcttccttctttctcc

SEQ ID NO: 771 - DNA, 207 bp, Homo sapien
cataaatattatactagcatttaccatctcacttctaggaatactagtatatcgctcacacctcatatcctccctactatgcctagaaggaataatactatcactgttcattatagctactctcataaccctcaacacccactccctcttagccaatattgtgcctattgccatactagtctttgccgcctgcgaagcagcggtagg

SEQ ID NO: 772 - DNA, 384 bp, Homo sapien
  misc_feature (1)...(384): n = A,T,C or G
cctactatgggtgttaaattttttactctctctacaaggttttttcctagtgtccaaagagctgttcctctttggactaacagttaaatttacaaggggatttagagggttctgngggcaaatttaaagttgaactaagattctatcttggacaaccagctatcaccaggctcggtaggtttgtcgcctctacctataaatcttcccactattttgctacatagacgggtgtgctcttttagctgttcttaggtagctcgtctggtttcgggggtcttagctttggctctccttgcaaagttatttctagttaattcattatgcagaaggtataggggttagtccttgctatattatgcttggttataatttttcatctttccc

SEQ ID NO: 773 - DNA, 182 bp, Homo sapien
cccttttcctaacactcacaacaaaactaactaatactaacatctcagacgctcagggaaatagaaaccgtctgaactatcctgcccgccatcatcctagtcctcatcgccctcccatccctacgcatcctttacataacagacgaggtcaacgatccctcccttaccatcaaatcaattgg

SEQ ID NO: 774 - DNA, 191 bp, Homo sapien
ccatggctaggtttatagatagttgggtggttgggtgtaaatgagtgaggcaggagtccgaggaggttagttgtggcaataaaaatgattaaggatactagtataagagatcaggttcgtcctttagtgttgtgtatggctatcatttgttttgaggttagtttgattagtcattgttgggtggtaattag

SEQ ID NO: 775 - DNA, 192 bp, Homo sapien
  misc_feature (1)...(192): n = A,T,C or G
ccatggctaagntatatagatagctgggtggctggagtaaatgantgaggnacgagtccgangaggttagttgaggcaataaaaatgatnaaggatactagtataagagatcangttcgtcctttacatgttgngtatggctatcatttgttttgaggctagnttgattagtcattgttgggtggtaattaa

SEQ ID NO: 776 - DNA, 144 bp, Homo sapien
ctgaccccctagaaccctggctctgccattagctaggacctaagactctgcccacattttggtctgttctctcccattacacataggtttgtctcagcatgcaagagtttttcctttaaaaaaaaaaaaaaaaaaaaaaaaaaa

SEQ ID NO: 777 - DNA, 483 bp, Homo sapien
  misc_feature (1)...(483): n = A,T,C or G
cctactatgggtgntaaattttttactctctctacaaggttttttcctagtgtccaaagagctgttcctctttggactaacagttaagtttacaaggggatttagagggttctgtgggcaaatttaaagttgaactaagattctatcttggacaaccagctatcaccaggctcggtaggtttgtcgcctctacctataaatcttcccactattttgctacatagacgggtgtgctcttttagctgttcttaggtagctcgtctggtttcgggggtcttagctttggctctccttgcaaagttatttctagttaattcattatgcagaaggtataggggntaagtccttgctatattatgcttggatataatttttcatctttcccttgcggtactatatctattgcgccaggtttcaatttctgccgcctatactttatttgggtaaatggtttggctaangttgctggtagaaggtggagtg

SEQ ID NO: 778 - DNA, 393 bp, Homo sapien
  misc_feature (1)...(393): n = A,T,C or G
ctgcatttttattgcgatctgcagatgaactgggaaaatctcattttacaacagaactgagacagacgaccaccatattcactgaggtctaaatttgcagtttccactaatgacattttgatttcccaacagagatacttctggtcttactgcacagtcttttaagagaaatacttccattatgccacattgtccttgatccgtaagtgatgtgttaaggtgcttcaaaggaactctgacctctgaagtacttgagctactttagtatgtccagcctattgctttttgttttagngngtcaccataaatatcaggggcataaaaggctatctattcttaattcaaggataaaacagaagaagcttgtggnataaaacaatagtcaagatccag

SEQ ID NO: 779 - DNA, 277 bp, Homo sapien
  misc_feature (1)...(277): n = A,T,C or G
cctnttgatttgatgggtaaggggagggatcgttgacctcgtctgttatgtaaaggatgcgtagggatgggagggcgatgaggactaggatgatggcgggcaggatagttcagacggtttctatttcctgagcgtctgagatgttagtattagttagttttgttgtgagtgttaggaaaagggcatacaggactaggaagcagataaggaaaatgactatgagggcgtgatcatgaaaggtgataagctcttctatgataggggaagtagcgtcttg

SEQ ID NO: 780 - DNA, 328 bp, Homo sapien
  misc_feature (1)...(328): n = A,T,C or G
catgntatggataaccatnttaactgtattttntgcancccgtaccttcttgggaatacaattgtctaactttttatttttggnctggctgttgtggtgtgcaaaactccgtacattgctattttgccacactgcaacaccttacagatgtggaagatgtgaaatttgtcatcaattatgactaccctaactcctcagaggattatattcatcgaattggaagaactgctcgcagtaccaaaacaggcacagcatacactttctttacacctaataacataaagcaggggagcgaccttatctctgtgcttcgggaagctaancaaac

SEQ ID NO: 781 - DNA, 305 bp, Homo sapien
  misc_feature (1)...(305): n = A,T,C or G
ctgttcagaaagctcattggacctggttttgaaaataaaacaaagttaaaaccctgggaggagttattgtgcagngtggagtactcaggctttcttataaagaaaaaaaaagttatctggtaccaaagtgtgcaacctacagaccctcaggtactgccctgtgacttctctgtatgacatcacaaggctgccaagtgcctgtttttctagaactaggagttggtgaggtttggctantgctgaaaccatgcataggattggtttactaaattaaaaccttattacgtacgtcctccaaaagacag

SEQ ID NO: 782 - DNA, 497 bp, Homo sapien
  misc_feature (1)...(497): n = A,T,C or G
cgaggtggctttaattgatgttaatgccttatgtcaaatgtaaagttagaatttgctagggctgggatagggagtgatatttctaggacttagacattgaaaactaattcagcctgtagtaacctggatggttttcaatggcatggttagtcaaattcatggttttaaacttagaagcagctttcgggggagagggtaggttggagcatttattacatattttactgtttaatgtcttaaccgtgggccttttaatttgtaaacactgaaatgattgttgggctgtggaaaacatttacctatttaccttggaagttttaaaagacagtccactttttagcatgtgtgttgcgtccagcctgtggtcgtcttaactaataaatgngatttttctctcaaaaaaaaaacctccccgggcggccgctcaagggcnaattccncacactggcggccgttactaggggatccganctcggtccaagcttggcgtaatcatg

SEQ ID NO: 783 - protein, 364 aa, Homo sapien
MWQPLFFKWLLSCCPGSSQIAAAASTQPEDDINTQRKKSQEKMREVTDSPGRPRELTIPQTSSHGANRFVPKSKALEAVKLAIEAGFHHIDSAHVYNNEEQVGLAIRSKIADGSVKREDIFYTSKLWSNSHRPELVRPALERSLKNLQLDYVDLYLIHFPVSVKPGEEVIPKDENGKILFDTVDLCATWEAMEKCKDAGLAKSIGVSNFNHRLLEMILNKPGLKYKPVCNQVECHPYFNQRKLLDFCKSKDIVLVAYSALGSHREEPWVDPNSPVLLEDPVLCALAKKHKRTPALIALRYQLQRGVVVLAKSYNEQRIRQNVQVFEFQLTSEEMKAIDGLNRNVRYLTLDIFAGPPNYPFSDEY

SEQ ID NO: 784 - DNA, 6353 bp, Homo sapien
tggcgaatgggacgcgccctgtagcggcgcattaagcgcggcgggtgtggtggttacgcgcagcgtgaccgctacacttgccagcgccctagcgcccgctcctttcgctttcttcccttcctttctcgccacgttcgccggctttccccgtcaagctctaaatcgggggctccctttagggttccgatttagtgctttacggcacctcgaccccaaaaaacttgattagggtgatggttcacgtagtgggccatcgccctgatagacggtttttcgccctttgacgttggagtccacgttctttaatagtggactcttgttccaaactggaacaacactcaaccctatctcggtctattcttttgatttataagggattttgccgatttcggcctattggttaaaaaatgagctgatttaacaaaaatttaacgcgaattttaacaaaatattaacgtttacaatttcaggtggcacttttcggggaaatgtgcgcggaacccctatttgtttatttttctaaatacattcaaatatgtatccgctcatgaattaattcttagaaaaactcatcgagcatcaaatgaaactgcaatttattcatatcaggattatcaataccatatttttgaaaaagccgtttctgtaatgaaggagaaaactcaccgaggcagttccataggatggcaagatcctggtatcggtctgcgattccgactcgtccaacatcaatacaacctattaatttcccctcgtcaaaaataaggttatcaagtgagaaatcaccatgagtgacgactgaatccggtgagaatggcaaaagtttatgcatttctttccagacttgttcaacaggccagccattacgctcgtcatcaaaatcactcgcatcaaccaaaccgttattcattcgtgattgcgcctgagcgagacgaaatacgcgatcgctgttaaaaggacaattacaaacaggaatcgaatgcaaccggcgcaggaacactgccagcgcatcaacaatattttcacctgaatcaggatattcttctaatacctggaatgctgttttcccggggatcgcagtggtgagtaaccatgcatcatcaggagtacggataaaatgcttgatggtcggaagaggcataaattccgtcagccagtttagtctgaccatctcatctgtaacatcattggcaacgctacctttgccatgtttcagaaacaactctggcgcatcgggcttcccatacaatcgatagattgtcgcacctgattgcccgacattatcgcgagcccatttatacccatataaatcagcatccatgttggaatttaatcgcggcctagagcaagacgtttcccgttgaatatggctcataacaccccttgtattactgtttatgtaagcagacagttttattgttcatgaccaaaatcccttaacgtgagttttcgttccactgagcgtcagaccccgtagaaaagatcaaaggatcttcttgagatcctttttttctgcgcgtaatctgctgcttgcaaacaaaaaaaccaccgctaccagcggtggtttgtttgccggatcaagagctaccaactctttttccgaaggtaactggcttcagcagagcgcagataccaaatactgtccttctagtgtagccgtagttaggccaccacttcaagaactctgtagcaccgcctacatacctcgctctgctaatcctgttaccagtggctgctgccagtggcgataagtcgtgtcttaccgggttggactcaagacgatagttaccggataaggcgcagcggtcgggctgaacggggggttcgtgcacacagcccagcttggagcgaacgacctacaccgaactgagatacctacagcgtgagctatgagaaagcgccacgcttcccgaagggagaaaggcggacaggtatccggtaagcggcagggtcggaacaggagagcgcacgagggagcttccagggggaaacgcctggtatctttatagtcctgtcgggtttcgccacctctgacttgagcgtcgatttttgtgatgctcgtcaggggggcggagcctatggaaaaacgccagcaacgcggcctttttacggttcctggccttttgctggccttttgctcacatgttctttcctgcgttatcccctgattctgtggataaccgtattaccgcctttgagtgagctgataccgctcgccgcagccgaacgaccgagcgcagcgagtcagtgagcgaggaagcggaagagcgcctgatgcggtattttctccttacgcatctgtgcggtatttcacaccgcatatatggtgcactctcagtacaatctgctctgatgccgcatagttaagccagtatacactccgctatcgctacgtgactgggtcatggctgcgccccgacacccgccaacacccgctgacgcgccctgacgggcttgtctgctcccggcatccgcttacagacaagctgtgaccgtctccgggagctgcatgtgtcagaggttttcaccgtcatcaccgaaacgcgcgaggcagctgcggtaaagctcatcagcgtggtcgtgaagcgattcacagatgtctgcctgttcatccgcgtccagctcgttgagtttctccagaagcgttaatgtctggcttctgataaagcgggccatgttaagggcggttttttcctgtttggtcactgatgcctccgtgtaagggggatttctgttcatgggggtaatgataccgatgaaacgagagaggatgctcacgatacgggttactgatgatgaacatgcccggttactggaacgttgtgagggtaaacaactggcggtatggatgcggcgggaccagagaaaaatcactcagggtcaatgccagcgcttcgttaatacagatgtaggtgttccacagggtagccagcagcatcctgcgatgcagatccggaacataatggtgcagggcgctgacttccgcgtttccagactttacgaaacacggaaaccgaagaccattcatgttgttgctcaggtcgcagacgttttgcagcagcagtcgcttcacgttcgctcgcgtatcggtgattcattctgctaaccagtaaggcaaccccgccagcctagccgggtcctcaacgacaggagcacgatcatgcgcacccgtggggccgccatgccggcgataatggcctgcttctcgccgaaacgtttggtggcgggaccagtgacgaaggcttgagcgagggcgtgcaagattccgaataccgcaagcgacaggccgatcatcgtcgcgctccagcgaaagcggtcctcgccgaaaatgacccagagcgctgccggcacctgtcctacgagttgcatgataaagaagacagtcataagtgcggcgacgatagtcatgccccgcgcccaccggaaggagctgactgggttgaaggctctcaagggcatcggtcgagatcccggtgcctaatgagtgagctaacttacattaattgcgttgcgctcactgcccgctttccagtcgggaaacctgtcgtgccagctgcattaatgaatcggccaacgcgcggggagaggcggtttgcgtattgggcgccagggtggtttttcttttcaccagtgagacgggcaacagctgattgcccttcaccgcctggccctgagagagttgcagcaagcggtccacgctggtttgccccagcaggcgaaaatcctgtttgatggtggttaacggcgggatataacatgagctgtcttcggtatcgtcgtatcccactaccgagatatccgcaccaacgcgcagcccggactcggtaatggcgcgcattgcgcccagcgccatctgatcgttggcaaccagcatcgcagtgggaacgatgccctcattcagcatttgcatggtttgttgaaaaccggacatggcactccagtcgccttcccgttccgctatcggctgaatttgattgcgagtgagatatttatgccagccagccagacgcagacgcgccgagacagaacttaatgggcccgctaacagcgcgatttgctggtgacccaatgcgaccagatgctccacgcccagtcgcgtaccgtcttcatgggagaaaataatactgttgatgggtgtctggtcagagacatcaagaaataacgccggaacattagtgcaggcagcttccacagcaatggcatcctggtcatccagcggatagttaatgatcagcccactgacgcgttgcgcgagaagattgtgcaccgccgctttacaggcttcgacgccgcttcgttctaccatcgacaccaccacgctggcacccagttgatcggcgcgagatttaatcgccgcgacaatttgcgacggcgcgtgcagggccagactggaggtggcaacgccaatcagcaacgactgtttgcccgccagttgttgtgccacgcggttgggaatgtaattcagctccgccatcgccgcttccactttttcccgcgttttcgcagaaacgtggctggcctggttcaccacgcgggaaacggtctgataagagacaccggcatactctgcgacatcgtataacgttactggtttcacattcaccaccctgaattgactctcttccgggcgctatcatgccataccgcgaaaggttttgcgccattcgatggtgtccgggatctcgacgctctcccttatgcgactcctgcattaggaagcagcccagtagtaggttgaggccgttgagcaccgccgccgcaaggaatggtgcatgcaaggagatggcgcccaacagtcccccggccacggggcctgccaccatacccacgccgaaacaagcgctcatgagcccgaagtggcgagcccgatcttccccatcggtgatgtcggcgatataggcgccagcaaccgcacctgtggcgccggtgatgccggccacgatgcgtccggcgtagaggatcgagatctcgatcccgcgaaattaatacgactcactataggggaattgtgagcggataacaattcccctctagaaataattttgtttaactttaagaaggagatatacatatgcagcatcaccaccatcaccactggcagcccctcttcttcaagtggctcttgtcctgttgccctgggagttctcaaattgctgcagcagcctccacccagcctgaggatgacatcaatacacagaggaagaagagtcaggaaaagatgagagaagttacagactctcctgggcgaccccgagagcttaccattcctcagacttcttcacatggtgctaacagatttgttcctaaaagtaaagctctagaggccgtcaaattggcaatagaagccgggttccaccatattgattctgcacatgtttacaataatgaggagcaggttggactggccatccgaagcaagattgcagatggcagtgtgaagagagaagacatattctacacttcaaagctttggagcaattcccatcgaccagagttggtccgaccagccttggaaaggtcactgaaaaatcttcaattggactatgttgacctctatcttattcattttccagtgtctgtaaagccaggtgaggaagtgatcccaaaagatgaaaatggaaaaatactatttgacacagtggatctctgtgccacatgggaggccatggagaagtgtaaagatgcaggattggccaagtccatcggggtgtccaacttcaaccacaggctgctggagatgatcctcaacaagccagggctcaagtacaagcctgtctgcaaccaggtggaatgtcatccttacttcaaccagagaaaactgctggatttctgcaagtcaaaagacattgttctggttgcctatagtgctctgggatcccatcgagaagaaccatgggtggacccgaactccccggtgctcttggaggacccagtcctttgtgccttggcaaaaaagcacaagcgaaccccagccctgattgccctgcgctaccagctgcagcgtggggttgtggtcctggccaagagctacaatgagcagcgcatcagacagaacgtgcaggtgtttgaattccagttgacttcagaggagatgaaagccatagatggcctaaacagaaatgtgcgatatttgacccttgatatttttgctggcccccctaattatccattttctgatgaatattaatgactcgagcaccaccaccaccaccactgagatccggctgctaacaaagcccgaaaggaagctgagttggctgctgccaccgctgagcaataactagcataaccccttggggcctctaaacgggtcttgaggggttttttgctgaaaggaggaactatatccggat

SEQ ID NO: 785 - DNA, 5502 bp, Homo sapien
tggcgaatgggacgcgccctgtagcggcgcattaagcgcggcgggtgtggtggttacgcgcagcgtgaccgctacacttgccagcgccctagcgcccgctcctttcgctttcttcccttcctttctcgccacgttcgccggctttccccgtcaagctctaaatcgggggctccctttagggttccgatttagtgctttacggcacctcgaccccaaaaaacttgattagggtgatggttcacgtagtgggccatcgccctgatagacggtttttcgccctttgacgttggagtccacgttctttaatagtggactcttgttccaaactggaacaacactcaaccctatctcggtctattcttttgatttataagggattttgccgatttcggcctattggttaaaaaatgagctgatttaacaaaaatttaacgcgaattttaacaaaatattaacgtttacaatttcaggtggcacttttcggggaaatgtgcgcggaacccctatttgtttatttttctaaatacattcaaatatgtatccgctcatgaattaattcttagaaaaactcatcgagcatcaaatgaaactgcaatttattcatatcaggattatcaataccatatttttgaaaaagccgtttctgtaatgaaggagaaaactcaccgaggcagttccataggatggcaagatcctggtatcggtctgcgattccgactcgtccaacatcaatacaacctattaatttcccctcgtcaaaaataaggttatcaagtgagaaatcaccatgagtgacgactgaatccggtgagaatggcaaaagtttatgcatttctttccagacttgttcaacaggccagccattacgctcgtcatcaaaatcactcgcatcaaccaaaccgttattcattcgtgattgcgcctgagcgagacgaaatacgcgatcgctgttaaaaggacaattacaaacaggaatcgaatgcaaccggcgcaggaacactgccagcgcatcaacaatattttcacctgaatcaggatattcttctaatacctggaatgctgttttcccggggatcgcagtggtgagtaaccatgcatcatcaggagtacggataaaatgcttgatggtcggaagaggcataaattccgtcagccagtttagtctgaccatctcatctgtaacatcattggcaacgctacctttgccatgtttcagaaacaactctggcgcatcgggcttcccatacaatcgatagattgtcgcacctgattgcccgacattatcgcgagcccatttatacccatataaatcagcatccatgttggaatttaatcgcggcctagagcaagacgtttcccgttgaatatggctcataacaccccttgtattactgtttatgtaagcagacagttttattgttcatgaccaaaatcccttaacgtgagttttcgttccactgagcgtcagaccccgtagaaaagatcaaaggatcttcttgagatcctttttttctgcgcgtaatctgctgcttgcaaacaaaaaaaccaccgctaccagcggtggtttgtttgccggatcaagagctaccaactctttttccgaaggtaactggcttcagcagagcgcagataccaaatactgtccttctagtgtagccgtagttaggccaccacttcaagaactctgtagcaccgcctacatacctcgctctgctaatcctgttaccagtggctgctgccagtggcgataagtcgtgtcttaccgggttggactcaagacgatagttaccggataaggcgcagcggtcgggctgaacggggggttcgtgcacacagcccagcttggagcgaacgacctacaccgaactgagatacctacagcgtgagctatgagaaagcgccacgcttcccgaagggagaaaggcggacaggtatccggtaagcggcagggtcggaacaggagagcgcacgagggagcttccagggggaaacgcctggtatctttatagtcctgtcgggtttcgccacctctgacttgagcgtcgatttttgtgatgctcgtcaggggggcggagcctatggaaaaacgccagcaacgcggcctttttacggttcctggccttttgctggccttttgctcacatgttctttcctgcgttatcccctgattctgtggataaccgtattaccgcctttgagtgagctgataccgctcgccgcagccgaacgaccgagcgcagcgagtcagtgagcgaggaagcggaagagcgcctgatgcggtattttctccttacgcatctgtgcggtatttcacaccgcatatatggtgcactctcagtacaatctgctctgatgccgcatagttaagccagtatacactccgctatcgctacgtgactgggtcatggctgcgccccgacacccgccaacacccgctgacgcgccctgacgggcttgtctgctcccggcatccgcttacagacaagctgtgaccgtctccgggagctgcatgtgtcagaggttttcaccgtcatcaccgaaacgcgcgaggcagctgcggtaaagctcatcagcgtggtcgtgaagcgattcacagatgtctgcctgttcatccgcgtccagctcgttgagtttctccagaagcgttaatgtctggcttctgataaagcgggccatgttaagggcggttttttcctgtttggtcactgatgcctccgtgtaagggggatttctgttcatgggggtaatgataccgatgaaacgagagaggatgctcacgatacgggttactgatgatgaacatgcccggttactggaacgttgtgagggtaaacaactggcggtatggatgcggcgggaccagagaaaaatcactcagggtcaatgccagcgcttcgttaatacagatgtaggtgttccacagggtagccagcagcatcctgcgatgcagatccggaacataatggtgcagggcgctgacttccgcgtttccagactttacgaaacacggaaaccgaagaccattcatgttgttgctcaggtcgcagacgttttgcagcagcagtcgcttcacgttcgctcgcgtatcggtgattcattctgctaaccagtaaggcaaccccgccagcctagccgggtcctcaacgacaggagcacgatcatgcgcacccgtggggccgccatgccggcgataatggcctgcttctcgccgaaacgtttggtggcgggaccagtgacgaaggcttgagcgagggcgtgcaagattccgaataccgcaagcgacaggccgatcatcgtcgcgctccagcgaaagcggtcctcgccgaaaatgacccagagcgctgccggcacctgtcctacgagttgcatgataaagaagacagtcataagtgcggcgacgatagtcatgccccgcgcccaccggaaggagctgactgggttgaaggctctcaagggcatcggtcgagatcccggtgcctaatgagtgagctaacttacattaattgcgttgcgctcactgcccgctttccagtcgggaaacctgtcgtgccagctgcattaatgaatcggccaacgcgcggggagaggcggtttgcgtattgggcgccagggtggtttttcttttcaccagtgagacgggcaacagctgattgcccttcaccgcctggccctgagagagttgcagcaagcggtccacgctggtttgccccagcaggcgaaaatcctgtttgatggtggttaacggcgggatataacatgagctgtcttcggtatcgtcgtatcccactaccgagatatccgcaccaacgcgcagcccggactcggtaatggcgcgcattgcgcccagcgccatctgatcgttggcaaccagcatcgcagtgggaacgatgccctcattcagcatttgcatggtttgttgaaaaccggacatggcactccagtcgccttcccgttccgctatcggctgaatttgattgcgagtgagatatttatgccagccagccagacgcagacgcgccgagacagaacttaatgggcccgctaacagcgcgatttgctggtgacccaatgcgaccagatgctccacgcccagtcgcgtaccgtcttcatgggagaaaataatactgttgatgggtgtctggtcagagacatcaagaaataacgccggaacattagtgcaggcagcttccacagcaatggcatcctggtcatccagcggatagttaatgatcagcccactgacgcgttgcgcgagaagattgtgcaccgccgctttacaggcttcgacgccgcttcgttctaccatcgacaccaccacgctggcacccagttgatcggcgcgagatttaatcgccgcgacaatttgcgacggcgcgtgcagggccagactggaggtggcaacgccaatcagcaacgactgtttgcccgccagttgttgtgccacgcggttgggaatgtaattcagctccgccatcgccgcttccactttttcccgcgttttcgcagaaacgtggctggcctggttcaccacgcgggaaacggtctgataagagacaccggcatactctgcgacatcgtataacgttactggtttcacattcaccaccctgaattgactctcttccgggcgctatcatgccataccgcgaaaggttttgcgccattcgatggtgtccgggatctcgacgctctcccttatgcgactcctgcattaggaagcagcccagtagtaggttgaggccgttgagcaccgccgccgcaaggaatggtgcatgcaaggagatggcgcccaacagtcccccggccacggggcctgccaccatacccacgccgaaacaagcgctcatgagcccgaagtggcgagcccgatcttccccatcggtgatgtcggcgatataggcgccagcaaccgcacctgtggcgccggtgatgccggccacgatgcgtccggcgtagaggatcgagatctcgatcccgcgaaattaatacgactcactataggggaattgtgagcggataacaattcccctctagaaataattttgtttaactttaagaaggagatatacatatgcagcatcaccaccatcaccactggcagcccctcttcttcaagtggctcttgtcctgttgccctgggagttctcaaattgctgcagcagcctccacccagcctgaggatgacatcaatacacagaggaagaagagtcaggaaaagatgagagaagttacagactctcctgggcgaccccgagagcttaccattcctcagacttcttcacatggtgctaacagatttgtttgatgaattctgcagatatccatcacactggcggccgctcgagcaccaccaccaccaccactgagatccggctgctaacaaagcccgaaaggaagctgagttggctgctgccaccgctgagcaataactagcataaccccttggggcctctaaacgggtcttgaggggttttttgctgaaaggaggaactatatccggat

SEQ ID NO: 786 - protein, 108 aa, Homo sapiens
RRSCEPATRVPEVWILSPLLRHGGHTQTQNHTASPRSPVMESPKKKNQQLKVGILHLGSRQKKIRIQLRSQVLGREMRDMEGDLQELHQSNTGDKSGFGFRRQGEDNT

SEQ ID NO: 787 - protein, 152 aa, Homo sapiens
RPKEEVPRSKALEVTKLAIEAGFRHIDSAHLYNNEEQVGLAIRSKIADGSVKREDIFYTSKLWSTFHRPELVRPALENSLKKAQLDYVDLYLIHSPMSLKPGEELSPTDENGKVIFDIVDLCTTWEAMEKCKDAGLAKSIGVSNFNPQAAGD

SEQ ID NO: 788 - DNA, 1633 bp, Homo sapiens; identical to SEQ ID NO: 316

SEQ ID NO: 789 - protein, 200 aa, Homo sapien
MAKGDPKKPKGKMSAYAFFVQTCREEHKKKNPEVPVNFAEFSKKCSERWKTMSGKEKSKFDEMAKADKVRYDREMKDYGPAKGGKKKKDPNAPKRPPSGFFLFCSEFRPKIKSTNPGISIGDVAKKLGEMWNNLNDSEKQPYITKAAKLKEKYEKDVADYKSKGKFDGAKGPAKVARKKVEEEDEEEEEEEEEEEEEEDE

SEQ ID NO: 790 - DNA, 457 bp, Homo sapiens
ttcgcctgtgttgggaacgcggcggagctgtgagccggcgactcgggtccctgaggtctggattctttctccgctactgagacacggcggacacacacaaacacagaaccacacagccagtcccaggagcccagtaatggagagccccaaaaagaagaaccagcagctgaaagtcgggatcctacacctgggcagcagacagaagaagatcaggatacagctgagatcccagtgcgcgacatggaaggtgatctgcaagagctgcatcagtcaaacaccggggataaatctggatttgggttccggcgtcaaggtgaagataatacctaaagaggaacactgtaaaatgccagaagcaggtgaagagcaaccacaagtttaaatgaagacaagctgaaacaacgcaagctggttttatattagatatttgacttaaactatctcaataaagttttgc

SEQ ID NO: 791 - protein, 126 aa, Homo sapiens
SPVLGTRRSCEPATRVPEVWILSPLLRHGGHTQTQNHTASPRSPVMESPKKKNQQLKVGILHLGSRQKKIRIQLRSQCATWKVICKSCISQTPGINLDLGSGVKVKIIPKEEHCKMPEAGEEQPQV

SEQ ID NO: 792 - DNA, 461 bp, Homo sapiens
cggcggagctgtgagccggcgactcgggtccctgaggtctggattctttctccgctactgagacacggcggacacacacaaacacagaaccacacagccagtcccaggagcccagtaatggagagccccaaaaagaagaaccagcagctgaaagtcgggatcctacacctgggcagcagacagaagaagatcaggatacagctgagatcccaggtgctgggaagggaaatgcgcgacatggaaggtgatctgcaagagctgcatcagtcaaacaccggggataaatctggatttgggttccggcgtcaaggtgaagataatacctaaagaggaacactgtaaaatgccagaagcaggtgaagagcaaccacaagtttaaatgaagacaagctgaaacaacgcaagctggttttatattagatatttgacttaaactatctcaataaagttttgcagctttc

SEQ ID NO: 793 - protein, 108 aa, Homo sapiens; identical to SEQ ID NO: 786

SEQ ID NO: 794 - DNA, 970 bp, Homo sapiens
tgggctcccagagctcgggtcctttgcagcctccaccctggcgatggctccctggtcctactttctctctcaaactggctttttctcattcctttgactccgccagacttcctcgcccccatgacctggtgttgtgtctgatcaccccaacattcctggctgcccaatgtggggcaatgaagaccccagtgaaggaatgctagagtgtgtgaaagtggaggacgcatcgtcaaaggacacctgaggacgtctcaaagaagctcggcgggagagctgagcgctcggaagaaccaagaatcatctcttttgaaaaatcgattcatcaaatgaatcttcagccaacaactgttcaagaaggatgcaaatatcacagtgttagatgaactttctggttgacacctgacaggaagagcctctgtattggaccaccatgtttgtgctcactgtgtagtaacaaaccaacacaccaaaatagcgggagttgccactgacaaagagttgaatgatcaaatgacggccaaaggaggaggttccgagaagtaaagctttggaggtcacaaaattagcaatagaagctgggttccgccatatagattctgctcatttatacaataatgaggagcaggttggactggccatccgaagcaagattgcagatggcagtgtgaagagagaagacatattctacacttcaaagctttggtccacttttcatcgaccagagttggtccgaccagccttggaaaactcactgaaaaaagctcaattggactatgttgacctctatcttattcattctccaatgtctctaaagccaggtgaggaactttcaccaacagatgaaaatggaaaagtaatatttgacatagtggatctctgtaccacctgggaggccatggagaagtgtaaggatgcaggattggccaagtccattggggtgtcaaacttcaacccgcaggcagctggagat

SEQ ID NO: 795 - protein, 152 aa, Homo sapiens; identical to SEQ ID NO: 787

SEQ ID NO: 796 - DNA, 2435 bp, Homo sapiens
atccactcgggccgcatcgccgcggtgcacaacgtgccgctgagcgtgctcatccggccgctgccgtccgtgttggaccccgccaaggtgcagagcctcgtggacacgatccgggaggacccagacagcgtgccccccatcgatgtcctctggatcaaaggggcccagggaggtgactacttctactcctttgggggctgccaccgctacgcggcctaccagcaactgcagcgagagaccatccccgccaagcttgtccagtccactctctcagacctaagggtgtacctgggagcatccacaccagacttgcagtagcagcctccttggcacctgctgccaccttcaagagcccagaagacacacctggcctccagcaggctgggccatgcagaagggatagcaggggtgcattctctttgcacctggcgagagggtctgactctgggcacccctctcaccagctacaaggccttggactcactgtacagtgtgggagccccagttcccacctctgtgacaataggatcatggccttacccttgaagcattaccgagaaggagaacagagatgggcttgaagagccacgtgctgccggctccaaattcccaaggacaaggatccctctgcatttttgtctatgtaacctcttatatggactacattcagctgcaaggaaaggaaaaccttgattgcagtggtttaaacaaacagaagattgtttttccacatagcatggattctggagatgggtggctaatggtattggttcaacaactccacgaaggtaggggtcacgtcttggatccttttgccttaatctcagtgctcgttacttcatggtcccaagatggctgctgtatccccaagaatcatgtctgcgttcaaggaaggaggggtggaggaagaggaagggccaaactagctggacccgtcaccttctatcagaaagtaaaacctcgtcagaagtctgtttcctgctctctccctctgcatatcttcacttagatgcccttggcccgagccagctaccattgcacctctagctgcaaacaaagctaagacagcagggaacagaattgtcatggctgaatagaccaatcgtgttccatctactgagactggcacactgcctcctgcaataaaactgggatcccattaccaagagagaaatgcagaattgtgtaccagttagcttttgctgtgtaacaaaccatccccaaacttggcagctagaaacaaaccctgtattttcccacaatcctatgggttggcaatttgggctgggctcaacagggcagttctgctgctcacacctgggatccctcatggagctaaggtcagctgttacctcagctgggcctggatggtctaggatagccttactcacttgcctggcaggtgacaggctgttggctggaattgcttggttctcctccatgtggcctctccagcaggctagctcaggcttattcacatgatggcttcaggattccaaagagagtgagagtagaagctgaaagacttcttgagttcttggcctggaactgggactaggacagtgtcacttctgctaagttcttttggtcagagcaaatcacaaggctttacccagattcaagggatgagaaacagactacatgtcttgatgaggggaaccacaaagagcttgtggccatttttcacctatcacaaataattttggatgggtatttatttggataaaggtatttccctcttccccctttctctctgtctcatggggcctcactctgccaagttggaaggcactaagacattgtcctggccctcagggtctaggggaagaggtgttggggcaggaagtgagtctctccatgggctggacccactgtagtaggagtgcctccttgtctgcactgctggtatggggttaggccaggtaggacattccagaggggcttctgaaaaccaagagtccctggggaaagggaacagagtaaggcaggccttgttctcactgccctctaagggaacttggtcactcggcacttttaagcctcagtttctccagttcaataataaggacaagagcttttcccatgcattctctttccccgggaaagttgactgaggtgaccagtaatagaattgaaaagggagagtgtcttcagtgcaatgtggcatcctggattgggtcttggaacaaaaacaggacattagtgggaaaattggaaatctgaaaaaagtctgaattttagttaatataccaatttcagtcycttggttttgacagatgtaccatggtgatgtaagatgttgaccttggggtaggctgggtgaagggtatacaggaactctttgtactatctctgcaacttctctgtaaatctagtatcattccaaaataaaagtttatttaatttaaaaaaaaaaaaaaaaaaaaaaaaaaaaa

SEQ ID NO: 797 - protein, 120 aa, Homo sapiens [sequence omitted]

SEQ ID NO: 798 - protein, 164 aa, Homo sapiens
PRVRGRVGSASHGGTWRAEPESGWGPRGRGRTAAGSGEKRALPWHGPPPPAARNGMARPELRPGGGGESRGGGDDGAACRRNAGQGRRGSGGARGARAERRRAGRQHPLGPHRRGAQRAAERAHPAAAVRVGPRQGAEPRGHDPGGPRQRAPHRCPLDQRGPGR

SEQ ID NO: 799 - protein, 60 aa, Homo sapiens
HASADAWAARVMAAPGERSRSRAGDRGVEAGPRRGRGRNARCPGTGPPPRPRGMVWPGRS

SEQ ID NO: 800 - DNA, 2477 bp, Homo sapien
gccttggcaaaaaagcacaagcgaaccccagccctgattgccctgcgctaccagctacagcgtggggttgtggtcctggccaagagctacaatgagcagcgcatcagacagaacgtgcaggtgtttgaattccagttgacttcagaggagatgaaagccatagatggcctaaacagaaatgtgcgatatttgacccttgatatttttgctggcccccctaattatccattttctgatgaatattaacatggagggcattgcatgaggtctgccagaaggccctgcgtgtggatggtgacacagaggatggctctatgctggtgactggacacatcgcctctggttaaatctctcctgcttggtgatttcagcaagctacagcaaagcccattggccagaaaggaaagacaataattttgttttttcattttgaaaaaattaaatgctctctcctaaagattcttcacctactttggtctccataacttctatgttttctttccttctgacacactagtgcccctaaattgtgatttgcctatacgtttagggccggggttggaagatgttaacaaccatttaagattcatttctgcagtgggagtgggtggagtttcaccctctgggaaaggggcaggtgacaggtatttatcagtcagtgcctctctagctcttgtaggaagaagcacacgcaggatggagtctagaggatgagcgatattgactagcaattcatgggctccctccagcagtgcgagggtcagagtttctggagccttgggaggaggcatccctgtgagggggggttagggagatgggagggcaccaggaaaagtgattagaagtcaggtatgggaaggctaaataggacagagtcgagtacatctctgcttggaaaaacatatcaacacccttttttttgaacattatatcttgctcataaaagaaaactttccacattgttttaacaaaccccacagctgagagtcaggcctgaatctttgatgtgtgcccagtcacagagttgaccctattggtttgtggtggggcagggcatcaaagacatcattgactaatcacattcccctgaatagctcatatttagaaaatattcttagattctaaaaatgtactattaatttgtgatattcagtcttttaaatattttatacattaaacaggcatagttacaaatataaaacaaaaatatcccaaagccattatgcatggcactcaagattaaaatgggaaataatacatctaataaatcaaatgttccaagacttcaaaggtcttttggaaacaggctatgtaaaacagcacactggtttcaaactttggtaaattttaagaacaactcttacaaaggcatttaattcttatacataattttcaggggacctaagttaatcagctaatcatgaagacatgattttcattttagaaaacacttttgaaaacttgggataatctcatgccttaatgatcaaagcattatgagaaggacagtggtttttaacctgggcatatgttctaacacatttactctccactattcgtactctggtagccatgttaaccccatcagagattccttctcaagccatgtctcagagctgagaggcatcccagcaagttttgcagctcacagttttttccgtaaattacttattctataaaattggagtaggccataaactttggagggccctagaccaattttttggattatttttcgtcttctatcattccgctgatcttagatattctctgcattaaatattaaatatcacttctaggctgaaaaatccccctaaaaatatttctagctcagatttttcctccaaattctgcaatagaagatcacaatgtgaactctgcatctccatgttaaagtctaatggacattcacacttagcatgtctcaaagaaatctcatgtaaaccatggccatcctgttctaccttaactttctgagtctatggaatgataatttcacatctcataaacttgactgatgtaagtgtcaagaaaagattgacattttgttaaaagttagtagtgaagtgtgtaacgcttaagcaaactttcatatttcaaatctctttagcaagtgtaactcttttttcaagatgtgaaataatcattaggtcagtcatttgtaaatagtacatctgctatggactttttccagttcttcaccatccatttttataaaactcttattgttaaaaaaaaagttactcagaatttcataaagccaaacacctgatttcaggaacacttgagatgtaagaaaattttatagggacctccaatcactaattttcctattttttctctcaaagaaatgctgaagggaggaattcaggttgaatgaaaggaaatagtaacttacagccatatagagttataaagacttcttgtaaatgtgaacatatggtaaaatataaaaacatgtatttttgaaaaaaaaa

SEQ ID NO: 801 - DNA, 1619 bp, Homo sapien
ggtacgcgcccgcttgcgctccggcctctactcggcggtcatcgtctacgacgagcgcagcccgcgcgccgagagcctccgcgaggacagcaccgtgtcgctggtggtgcaggcgctgcgccgcaacgccgagcgcaccgacatctgcctgctcaaaggcggctatgagaggttttcctccgagtacccagaattctgttctaaaaccaaggccctggcagccatcccacccccggttccccccagtgccacagagcccttggacctgggctgcagctcctgtgggaccccactacacgaccaggggggtcctgtggagatccttcccttcctctacctcggcagtgcctaccatgctgcccggagagacatgctggacgccctgggcatcacggctctgttgaatgtctcctcggactgcccaaaccactttgaaggacactatcagtacaagtgcatcccagtggaagataaccacaaggccgacatcagctcctggttcatggaagccatagagtacatcgatgccgtgaaggactgccgtgggcgcgtgctggtgcactgccaggcgggcatctcgcggtcggccaccatctgcctggcctacctgatgatgaagaaacgggtgaggctggaggaggccttcgagttcgttaagcagcgccgcagcattatctcgcccaacttcagcttcatggggcagctgctgcagttcgagtcccaggtgctggccacgtcctgtgctgcggaggctgctagcccctcgggacccctgcgggagcggggcaagacccccgccacccccacctcgcagttcgtcttcagctttccggtctccgtgggcgtgcactcggcccccagcagcctgccctacctgcacagccccatcaccacctctcccagctgttagagccgccctgggggccccagaaccagagctggctcccagcaagggtaggacgggccgcatgcgggcagaaagttgggactgagcagctgggagcaggcgaccgagctccttccccatcatttctccttggccaacgacgaggccagccagaatggcaataaggactccgaatacataataaaagcaaacagaacactccaacttagagcaataacggctgccgcagcagccagggaagaccttggtttggtttatgtgtcagtttcacttttccgatagaaatttcttacctcatttttttaagcagtaaggcttgaagtgatgaaacccacagatcctagcaaatgtgcccaaccagctttactaaagggggaggaagggagggcaaagggatgagaagacaagtttcccagaagtgcctggttctgtgtacttgtccctttgttgtcgttgttgtagttaaaggaatttcattttttaaaagaaatcttcgaaggtgtggttttcatttctcagtcaccaacagatgaataattatgcttaataataaagtatttattaagactttcttcagagtatgaaagtacaaaaagtctagttacagtggatttagaatatatttatgttgatgtcaaacagctgagcaccgtagcatgcagatgtcaaggcagttaggaagaattaggtttgaattgctttttaaaaaaaa

SEQ ID NO: 802 - DNA, 3115 bp, Homo sapien
cgtccgcggacgcgtgggctcatcttgagaagcaggcgggttgggtgggaggaggaagaaagggaagaattaggtttgaattgcttttttaaaaaaaaagaaaagaaaaaaaaagacagcatctcactatgttgccaaggctcatctcaagctcttgggctcaagagatcctcccacctcggcctcctgagtagctgggactgcaggtgtgtgtcatcatgaccaatgtgaattgcttttgaagctggttcatgggcatgtaggccaccgaagcaattttagaccacagtaagtcaagcttttttccctccgatgatcactgggtggttgcagcattttttgcataaacctgcctaagacttgtctatcgtctgtgatcaatatgccatattacactaaggtgctcctggaaaattgggtgcagttcaaattttcctacagcaaatcatttggcaaggccagccattggggaaaccagacaactagagataaccctgaaatgaatccttttgtaaattgaagcaccatcttttctttttttgcataaattggaggttttaattttagggcagttacctgaagtgaaatataccaacaatttcttgtgttctttaaattcctagttaggtgaatatttttgaaggtcctcttttgaataaagaggggaatggacaccacatttcaggtcttctcgaagtgtggaagggcaagagagcatcagtgagctgatggtggattgcttacatcggattccattggtatgaatttcccaaactggaaatcaaagcgccagggtggggttggggctgactgctggtgagggggctggccgctggctcccgtgacgtgcgtcatgggcacgcaggcgccattttgaatctatcgtcggcacgtgggtgccattttgaatccttagttgggcctttctaaatggagaatggctttggagggagacacgttttctgtggggagggtttgggggggagggaggagggaacaagctacatgctattttgtttgtagtattgtggaacagtcttgttatggagtgccagcttagaggttgttgcaaacttgtctagaagtgagagcatggttttttttagccctttgagagtctacatctaatgaacattcttgctcacccataaataacgtcaagcctcaatgtcaccgtcacgttgggatactctttctcatctggcatcctagacaggacaaggttggttacctttccttccatgaaccatgaacctgtgacggcatcattcatcctgacttcaccaagctccgcctgtgggtgaggccagagctcccactggcaatttttagaagagccagaggctccctgcttcctctagaaataacagttcagggtgaagcatggagggtttcagttcccagacaatggaaccatttagagacaacacagttggacatttccactttttccttgattcctggaagtccagtgggttctgcagctgaaaaagccctgggtcccagcagcagagagacaggacagaggggatgcttgggcggggagggacggtaacctgcagaacagattccatttttatagaacgagtacacgtttgctaaaacagtcctgctttcccagactggattcccaccacagggacagtcggaactcaggactagctccagcgacatctttcctccgaattcaagccttctatcacaatgtcaaaacagctatttataaagccattttcattgtacttgataacagcacgagtcccaaaacttttagaaataaaataggacattggcttgattgaaaagagggactttttaaaaattgttctttcgtcagaagccttttggatgacttacaatagctctgatgaagataccaccccagcgtcagtccaataggtcagtgagtttcaacaggcatccatccctcccatgaagggattctggtgaggggaagtttctgtaatgacaggaaagcattgaccctcattgattgtcaactttggtattagccatgaaagacaggatgctcattgggtgttctgtagagtgaggaatgctgcctattccctcccagaacgtctgacccaggggtgtgtgttgaggagccctgggggaaatggaccaagttttcccacagagcagtattaggctgaagagcaggtgactggtaggccccagctcccatcattccctcccaaagccattttgttcagttgctcatccacgctggattccagagagttttccaatttgggaagccatgagaaaggtttttaaatcttgggaagatggagagagggacataggatagttgactccaacatgacaggaagaggctggagattgggaattggccatcaaccaagcctgtagtagtaaagccatggtcccgcattggaattacttggggaacttatacagttctgatacccaggctctcctagaccagttcaaccaattctaggtgggggactcaggcatcagtgtgtttcgtagctccccgggtgttttccctgtgcagccgagcttgggaaactgccatgctttttggatgtcaaggcgctgttggaggctgggtgtgacagcacagagccaggttgtcttgtggaaaccacagccacgggtttgccactggctcagcatggcctcactgccagtcccagcctggctgagggacaagatggtttctcttgggagttcctgagtggagcacccttccaggctttttgaaagccagctgatctgtggagccttgttaagggactcaatacggtgtttggatattgatgtttttccttgagactgtcttgtccatcaataaagatggaggatgtctcctctttgaaccccgcttccccaccagtactctctctcccttagagtttatgagttattcaaggaggagacttcttaaagacagcaacgcaattcttgtaacttgtgtaaatagccccatctttcagagtgataccatttctacatttgataatgcctgtattcctgtaggatgtatatagtttaggggattttttttttgtttggttttgttttttagaagtcaatatgtctggttttatttattgcttgaaaaagatcatttgaaaaaaataaa

SEQ ID NO: 803 - DNA, 1238 bp, Homo sapien
cccgggttctcttctcttcctcgcgcgcccagccgcctcggttcccggcgaccatggtgacgatggaggagctgcgggagatggactgcagtgtgctcaaaaggctgatgaaccgggacgagaatggcggcggcgcgggcggcagcggcagccacggcaccctggggctgccgagcggcggcaagtgcctgctgctggactgcagaccgttcctggcgcacagcgcgggctacatcctaggttcggtcaacgtgcgctgtaacaccatcgtgcggcggcgggctaagggctccgtgagcctggagcagatcctgcccgccgaggaggaggtacgcgcccgcttgcgctccggcctctactcggcggtcatcgtctacgacgagcgcagcccgcgcgccgagagcctccgcgaggacagcaccgtgtcgctggtggtgcaggcgctgcgccgcaacgccgagcgcaccgacatctgcctgctcaaaggcggctatgagaggttttcctccgagtacccagaattctgttctaaaaccaaggccctggcagccatcccacccccggttccccccagcgccacagagcccttggacctggactgcagctcctgtgggaccccactacacgaccaggagggtcctgtggagatccttcccttcctctacctcggcagtgcctaccatgctgcccggagagacatgctggacgccctgggcatcacggctctgttgaatgtctcctcggactgcccaaaccactttgaaggacactatcagtacaagtgcatcccagtggaagataaccacaaggccgacatcagctcctggttcatggaagccatagagtacatcgatgccgtgaaggactgccgtgggcgcgtgctggtgcactgccaggcgggcatctcgcggtcggccaccatctgcctggcctacctgatgatgaagaaacgggtgaggctggaggaggccttcgagttcgttaagcagcgccgcagcatcatctcgcccaacttcagcttcatggggcagctgctgcagttcgagtcccaggtgctggccacgtcctgtgctgcggaggctgctagcccctcgggacccctgggggagcggggcaagacccccgccacccccacctcgcagttcgtcttcagctttccggtctccgtgggcgtgcactcggcccccagcagcctgccctacctgcacagccccatcaccacctctcccagctgttag

SEQ ID NO: 804 - DNA, 4637 bp, Homo sapiens
ggtacgcgcccgcttgcgctccggcctctactcggcggtcatcgtctacgacgagcgcagcccgcgcgccgagagcctccgcgaggacagcaccgtgtcgctggtggtgcaggcgctgcgccgcaacgccgagcgcaccgacatctgcctgctcaaaggcggctatgagaggttttcctccgagtacccagaattctgttctaaaaccaaggccctggcagccatcccacccccggttccccccagtgccacagagcccttggacctgggctgcagctcctgtgggaccccactacacgaccaggggggtcctgtggagatccttcccttcctctacctcggcagtgcctaccatgctgcccggagagacatgctggacgccctgggcatcacggctctgttgaatgtctcctcggactgcccaaaccactttgaaggacactatcagtacaagtgcatcccagtggaagataaccacaaggccgacatcagctcctggttcatggaagccatagagtacatcgatgccgtgaaggactgccgtgggcgcgtgctggtgcactgccaggcgggcatctcgcggtcggccaccatctgcctggcctacctgatgatgaagaaacgggtgaggctggaggaggccttcgagttcgttaagcagcgccgcagcattatctcgcccaacttcagcttcatggggcagctgctgcagttcgagtcccaggtgctggccacgtcctgtgctgcggaggctgctagcccctcgggacccctgcgggagcggggcaagacccccgccacccccacctcgcagttcgtcttcagctttccggtctccgtgggcgtgcactcggcccccagcagcctgccctacctgcacagccccatcaccacctctcccagctgttagagccgccctgggggccccagaaccagagctggctcccagcaagggtaggacgggccgcatgcgggcagaaagttgggactgagcagctgggagcaggcgaccgagctccttccccatcatttctccttggccaacgacgaggccagccagaatggcaataaggactccgaatacataataaaagcaaacagaacactccaacttagagcaataacggctgccgcagcagccagggaagaccttggtttggtttatgtgtcagtttcacttttccgatagaaatttcttacctcatttttttaagcagtaaggcttgaagtgatgaaacccacagatcctagcaaatgtgcccaaccagctttactaaagggggaggaagggagggcaaagggatgagaagacaagtttcccagaagtgcctggttctgtgtacttgtccctttgttgtcgttgttgtagttaaaggaatttcattttttaaaagaaatcttcgaaggtgtggttttcatttctcagtcaccaacagatgaataattatgcttaataataaagtatttattaagactttcttcagagtatgaaagtacaaaaagtctagttacagtggatttagaatatatttatgttgatgtcaaacagctgagcaccgtagcatgcagatgtcaaggcagttaggaagaattaggtttgaattgcttttttaaaaaaaaagaaaagaaaaaaaaagacagcatctcactatgttgccaaggctcatctcaagctcttgggctcaagagatcctcccacctcggcctcctgagtagctgggactgcaggtgtgtgtcatcatgaccaatgtgaattgcttttgaagctggttcatgggcatgtaggccaccgaagcaattttagaccacagtaagtcaagcttttttccctccgatgatcactgggtggttgcagcattttttgcataaacctgcctaagacttgtctatcgtctgtgatcaatatgccatattacactaaggtgctcctggaaaattgggtgcagttcaaattttcctacagcaaatcatttggcaaggccagccattggggaaaccagacaactagagataaccctgaaatgaatccttttgtaaattgaagcaccatcttttctttttttgcataaattggaggttttaattttagggcagttacctgaagtgaaatataccaacaatttcttgtgttctttaaattcctagttaggtgaatatttttgaaggtcctcttttgaataaagaggggaatggacaccacatttcaggtcttctcgaagtgtggaagggcaagagagcatcagtgagctgatggtggattgcttacatcggattccattggtatgaatttcccaaactggaaatcaaagcgccagggtggggttggggctgactgctggtgagggggctggccgctggctcccgtgacgtgcgtcatgggcacgcaggcgccattttgaatctatcgtcggcacgtgggtgccattttgaatccttagttgggcctttctaaatggagaatggctttggagggagacacgttttctgtggggagggtttgggggggagggaggagggaacaagctacatgctattttgtttgtagtattgtggaacagtcttgttatggagtgccagcttagaggttgttgcaaacttgtctagaagtgagagcatggttttttttagccctttgagagtctacatctaatgaacattcttgctcacccataaataacgtcaagcctcaatgtcaccgtcacgttgggatactctttctcatctggcatcctagacaggacaaggttggttacctttccttccatgaaccatgaacctgtgacggcatcattcatcctgacttcaccaagctccgcctgtgggtgaggccagagctcccactggcaatttttagaagagccagaggctccctgcttcctctagaaataacagttcagggtgaagcatggagggtttcagttcccagacaatggaaccatttagagacaacacagttggacatttccactttttccttgattcctggaagtccagtgggttctgcagctgaaaaagccctgggtcccagcagcagagagacaggacagaggggatgcttgggcggggagggacggtaacctgcagaacagattccatttttatagaacgagtacacgtttgctaaaacagtcctgctttcccagactggattcccaccacagggacagtcggaactcaggactagctccagcgacatctttcctccgaattcaagccttctatcacaatgtcaaaacagctatttataaagccattttcattgtacttgataacagcacgagtcccaaaacttttagaaataaaataggacattggcttgattgaaaagagggactttttaaaaattgttctttcgtcagaagccttttggatgacttacaatagctctgatgaagataccaccccagcgtcagtccaataggtcagtgagtttcaacaggcatccatccctcccatgaagggattctggtgaggggaagtttctgtaatgacaggaaagcattgaccctcattgattgtcaactttggtattagccatgaaagacaggatgctcattgggtgttctgtagagtgaggaatgctgcctattccctcccagaacgtctgacccaggggtgtgtgttgaggagccctgggggaaatggaccaagttttcccacagagcagtattaggctgaagagcaggtgactggtaggccccagctcccatcattccctcccaaagccattttgttcagttgctcatccacgctggattccagagagttttccaatttgggaagccatgagaaaggtttttaaatcttgggaagatggagagagggacataggatagttgactccaacatgacaggaagaggctggagattgggaattggccatcaaccaagcctgtagtagtaaagccatggtcccgcattggaattacttggggaacttatacagttctgatacccaggctctcctagaccagttcaaccaattctaggtgggggactcaggcatcagtgtgtttcgtagctccccgggtgttttccctgtgcagccgagcttgggaaactgccatgctttttggatgtcaaggcgctgttggaggctgggtgtgacagcacagagccaggttgtcttgtggaaaccacagccacgggtttgccactggctcagcatggcctcactgccagtcccagcctggctgagggacaagatggtttctcttgggagttcctgagtggagcacccttccaggctttttgaaagccagctgatctgtggagccttgttaagggactcaatacggtgtttggatattgatgtttttccttgagactgtcttgtccatcaataaagatggaggatgtctcctctttgaaccccgcttccccaccagtactctctctcccttagagtttatgagttattcaaggaggagacttcttaaagacagcaacgcaattcttgtaacttgtgtaaatagccccatctttcagagtgataccatttctacatttgataatgcctgtattcctgtaggatgtatatagtttaggggattttttttttgtttggttttgttttttagaagtcaatatgtctggttttatttattgcttgaaaaagatcatttgaaaaaaataaa

SEQ ID NO: 805 - protein, 394 aa, Homo sapiens
MVTMEELREMDCSVLKRLMNRDENGGGAGGSGSHGTLGLPSGGKCLLLDCRPFLAHSAGYILGSVNVRCNTIVRRRAKGSVSLEQILPAEEEVRARLRSGLYSAVIVYDERSPRAESLREDSTVSLVVQALRRNAERTDICLLKGGYERFSSEYPEFCSKTKALAAIPPPVPPSATEPLDLDCSSCGTPLHDQEGPVEILPFLYLGSAYHAARRDMLDALGITALLNVSSDCPNHFEGHYQYKCIPVEDNHKADISSWFMEAIEYIDAVKDCRGRVLVHCQAGISRSATICLAYLMMKKRVRLEEAFEFVKQRRSIISPNFSFMGQLLQFESQVLATSCAAEAASPSGPLGERGKTPATPTSQFVFSFPVSVGVHSAPSSLPYLHSPITTSPSC

SEQ ID NO: 806 - protein, 302 aa, Homo sapiens
VRARLRSGLYSAVIVYDERSPRAESLREDSTVSLVVQALRRNAERTDICLLKGGYERFSSEYPEFCSKTKALAAIPPPVPPSATEPLDLGCSSCGTPLHDQGGPVEILPFLYLGSAYHAARRDMLDALGITALLNVSSDCPNHFEGHYQYKCIPVEDNHKADISSWFMEAIEYIDAVKDCRGRVLVHCQAGISRSATICLAYLMMKKRVRLEEAFEFVKQRRSIISPNFSFMGQLLQFESQVLATSCAAEAASPSGPLRERGKTPATPTSQFVFSFPVSVGVHSAPSSLPYLHSPITTSPSC

SEQ ID NO: 807 - DNA, 3829 bp, Homo sapiens
gtttgaaagtgtgtagcacctccaccttctctctctctctccctctccctctcctgccagccaagtgaagacatgcttacttccccttcaccttccttcatgatgtgggaagagtgctgcaacccagccctagccaacgccgcatgagagggagtgtgccgagggcttctgagaaggtttctctcacatctagaaagaagcgcttaagatgtggcagcccctcttcttcaagtggctcttgtcctgttgccctgggagttctcaaattgctgcagcagcctccacccagcctgaggatgacatcaatacacagaggaagaagagtcaggaaaagatgagagaagttacagactctcctgggcgaccccgagagcttaccattcctcagacttcttcacatggtgctaacagatttgttcctaaaagtaaagctctagaggccgtcaaattggcaatagaagccgggttccaccatattgattctgcacatgtttacaataatgaggagcaggttggactggccatccgaagcaagattgcagatggcagtgtgaagagagaagacatattctacacttcaaagctttggagcaattcccatcgaccagagttggtccgaccagccttggaaaggtcactgaaaaatcttcaattggactatgttgacctctatcttattcattttccagtgtctgtaaagccaggtgaggaagtgatcccaaaagatgaaaatggaaaaatactatttgacacagtggatctctgtgccacatgggaggccatggagaagtgtaaagatgcaggattggccaagtccatcggggtgtccaacttcaaccacaggctgctggagatgatcctcaacaagccagggctcaagtacaagcctgtctgcaaccaggtggaatgtcatccttacttcaaccagagaaaactgctggatttctgcaagtcaaaagacattgttctggttgcctatagtgctctgggatcccatcgagaagaaccatgggtggacccgaactccccggtgctcttggaggacccagtcctttgtgccttggcaaaaaagcacaagcgaaccccagccctgattgccctgcgctaccagctgcagcgtggggttgtggtcctggccaagagctacaatgagcagcgcatcagacagaacgtgcaggtgtttgaattccagttgacttcagaggagatgaaagccatagatggcctaaacagaaatgtgcgatatttgacccttgatatttttgctggcccccctaattatccattttctgatgaatattaacatggagggcattgcatgaggtctgccagaaggccctgcgtgtggatggtgacacagaggatggctctatgctggtgactggacacatcgcctctggttaaatctctcctgcttggcgacttcagtaagctacagctaagcccatcggccggaaaagaaagacaataattttgtttttcattttgaaaaaattaaatgctctctcctaaagattcttcacctactttggtctccataacttctatgttttctctccttctgacacactagtgcccccaaattgtgatttgcctatacgtttagggccgggattggaagatgttaacaaccatttaagattcatttctgcagtgggagtgggtggagtttcaccctctgggaaaggggcaggtgacaggtatttatcagtcagtgcctctctagctcttgtaggaagaagcacacgcaggatggagtctagaggatgagcgatattgaccagcaattcatgggctccctccagcagtgcgagggtcagagtttctggagccttgggaggaggcaaccctgtgagggggggttagggagatgggagggcaccaggaaaagtgattagaagtcaggtatgggaaggctaaataggacagagtcgagtacatctctgcttggaaaaacatatcaacaccctttttttttgatcattatatcttgttcataaaagaaaactttccacattgttttaacaaaccccacagctgagagtcaggcctgaatctttgatgtgtgcccattcacaacgttgaccctattggtttgtggtggggcaggacatcgaagatatcattgactaatcacattcccctgaatagctcatatttagaaaatattcttagattgtaaaaatgtactgttcatttgttatattcaatcttttaaatgttttatactttaaacaaggcatagttacaagtataaaacataaatatcccaaagccattatgcatggcactcaagattaaaatgggaaataatacatctaataaatcaaatgttccaagacttcaaatgtcttttggaaacaggctatgtaaaacagcacactggtttcaaactttggtaaattttaagaagaactcttacaaaggcatttaattcttatacataattttcaggggacctaagttaatcagctaatcatgaagacatgattttcgttttagaaaacacttttgaaaacttgggataatctcatgtcttaatgatcaaagcattatgagaaggacagtggttttttacctgggcacactttctaacacatttactctccactattcgtactctggtagccacgttaaccccatcagagattccttctcaagccatgtctcagagctgataggcatcccagcaagttttgcagctcacaatttttctgtaaattacttattctataaaattggaagaggccataaactttggagggccctagaccaattttttggattatttctggtctactctcattccgttgatgatcttagatattctctgcattaaatatcacctctaggctgagaaatccaccaaaaaatatttctagctcagcgttttcctccaaatcttcaatggaagatcataatgtgaactctgcatctccatgttaaagtttaatggacattcacatttagcatgtctcaaagaaatctcatgtaaaccatggccatcctgttctaccttaactttctgagtctatggaatgataatttcacatctcataaacttgactgatgtaagtgtcaagaaaagattgacattttgttaaaacttcgtagccaagtgtgtaacgcttaagcagactttcatatttcaaatctctatagcacgtgtaactcttttttcaagatgtgaaataatcattaggtcagtcatttgtaaatagtacagctgctgtgggctttttccagttcttcaccatccatttttataaaactcttattgttaaaaaaaaaaagttactcagaatttcataaagccaaacacctgatttcaggaacacttgagatgtaagaaaattttatagggacctccaatcactaattttcctattttttctctcaaagaaatgctgaagggaggaattcaggttgaatgaaaggaaatagtaacttacagccatatagagttataaagacttcttgtaaatgtgaacatatggtaaaatataaaaacatgtatttttgaaaaaatggattctactcattattttacttccatttaagatataaatgtagagaaataagtataattctaagctaatacgtacgcaatgtaggaagctgtaattactgaccaaaactatgtgaagtggagaaaacctggggaagtggatggttttagatgaaactgaagttaaattcatattgatttaaagtaaattgttataactttataaagtttttcatcatcaccacagcaatcacaaagagaataattatgaatatacgcaagaggaaatgagaagggaatccaaatgtcattaaaaaaaaa

SEQ ID NO: 808 - DNA, 781 bp, Homo sapiens
gcggcggagctgtgagccggcgactcgggtccctgaggtctggattctttctccgctactgagacacggcgggtaggtccacaggcagatccaactgggagttgaagtgtgagtgagagtgaagaggaaccagcaggcttccggagggttgtgtggtcagtgactcagagtgagaaggccctcgaagtcgtcgtccctctcatgcggtgccacgcccatggaccttcttgtctcgtcacggccataactagggaggaaggagggccgaggagtggaggggctcaggcgaagctggggtgctgttgggggtatccgagtcccagaagcacctggaaccccgacagaagattctggactccccagacgggaccaggagagggacggcatgagcgacacacacaaacacagaaccacacagccagtcccaggagcccagtaatggagagccccaaaaagaagaaccagcagctgaaagtcgggatcctacacctgggcagcagacagaagaagatcaggatacagctgagatcccagtgcgcgacatggaaggtgatctgcaagagctgcatcagtcaaacaccggggataaatctggatttgggttccggcgtcaaggtgaagataatacctaaagaggaacactgtaaaatgccagaagcaggtgaagagcaaccacaagtttaaatgaagacaagctgaaacaacgcaagctggttttatattagatatttgacttaaactatctcaataaagttttgcagctttcaccaaaaaaaaaaaa

SEQ ID NO: 809 - protein, 160 aa, Homo sapiens
MRCHAHGPSCLVTAITREEGGPRSGGAQAKLGCCWGYPSPRSTWNPDRRFWTPQTGPGEGRHERHTQTQNHTASPRSPVMESPKKKNQQLKVGILHLGSRQKKIRIQLRSQCATWKVICKSCISQTPGINLDLGSGVKVKIIPKEEHCKMPEAGEEQPQV

SEQ ID NO: 810 - DNA, 624 bp, Homo sapiens
  misc_feature (1)...(624): n=A,T,C or G
atganaaggagatgacacaaaagttagatctcatcacaagtgatttggcagattaccagcagcccctcatgatnggcaccgggacagtcacgaggaagggctccaccttccggcccatggacacggatgccgaggaggcaggggtgagcaccgatgccggcggccactatgactgcccgcagcgggccggccgccacgagtacgcgctgcccctggcgcccccggagcccgagtacgccacgcccatcgtggagcggcacgtgctgcgcgcccacacgttctctgcgcagagcggctaccgcgtcccagggccccagcccggccacaaacactccctctcctcgggcggcttctcccccgtagcgggtgtgggcgcccaggacggagactatcaaaggccacacagcgcacagcctgcggacaggggctacgaccggcccaaagctgtcagcgccctcgccaccgaaagcggacaccctgactctcagaagcccccaacgcatcccgggacaagtgacagctattctgcccccagagactgcctcacacccctcaaccagacggccatgactgcccttttgtgaacacaatgtgaaagaagcctgctgtggtactgagcgtcgg

SEQ ID NO: 811 - DNA, 572 bp, Homo sapiens
agcgggctgtgaggacgctctgggccaggctgcagcgcgagcgttccgagctgctgggctctttcgaggatgttctgatacgcgcgtcggcctgcctggaggaggcggcccgggagcgcgacggcctggagcaggcgctgcggaggcgcgagagcgagcacgagagggaggtgcgcgctctgtacgaggagacggagcagcttcgggagcagagccggcgcccgccgagtcagaacttcgcccgcggggagcggagaagccgtctggagctggagctgcagatccgcgagcaggacctggaacgcgcgggcctgcggcagcgggagttagagcagcagctgcacgcccaggctgcggagcacctggaggcacaggcccagaactcccagctgtggcgggcgcacgaggcgctgcgaacgcagctggagggggcgcaggagcagatccgcaggctggagagcgaagcacgaggccgccaggagcaaacccaacgagacgtggtcgccgtctccaggaacatgcagaaagagaaagtcagcctgctacggcaactggagctgctcagggagctg

SEQ ID NO: 812 - DNA, 594 bp, Homo sapiens
  misc_feature (1)...(594): n=A,T,C or G
cggaagttggcgcagcgcggttgccaatggtcgctccctgatttnatgccgctcgtggtgttttgcgggctgccgtacagcggcaagagccggcgtgctgaagagttgcgcgtggcgctggctgccgagggccgcgcggtgtacgtggtggacgacgcagctgtcctgggcgcagaggacccagcggtgtacggcgattctgcccgtgagaaggcattgcgtggagctctgcgagcctccgtggaacggcgcctgagtcgccacgacgtggtcatcctggactcgcttaactacatcaaaggtttccgttacgagctctactgcctggcacgggcggcgcgcaccccgctctgcctggtctactgcgtacggcccggcggcccgatcgcgggacctcaggtggcgggcgcgaacgagaaccctggccggaacgtcagtgtgagttggcggccacgcgctgaggaggacgggagagcccaggcggcgggcagcagcgtcctcagggaactgcatactgcggactctgtagtaaatggaagtgcccaggccgacgtacccaaggaactggagcgagaagaatccggggctgcggag

SEQ ID NO: 813 - DNA, 561 bp, Homo sapiens
  misc_feature (1)...(561): n=A,T,C or G
tctgacacacgagaccggttatcccatctccgcgcccctctgtgggtattacacagccactagatgaagccaaacattgttggaggtactgaaatcttagactccaccatgtgtccaggancccattgacgtcctctcttctgaaaactccgtgtggccctcgctctgcactgtcatgaggcggtgatggagctagatacccaccacggacaatgatcatcagtttggggttctctgggtctcacagggacgcacattctaggggtagcacgacactccccctgtagttgctccacacaaacgggatctctcatccaggcgatacgtctggtcctgtggcatgtggctctcnacgaaacaccagggangcattatgttggggacttcttggggctctgctggtctctgctccagacacgattaatccgaaatgtgttaantcgancacatgggtccacgtccaggacagctcccatcgaactctcnaggctctctanctcagggatgaaggaggtnaagtgatcgatnctcacaagcganagctctcgcncnatatctgcg

SEQ ID NO: 814 - DNA, 307 bp, Homo sapiens
  misc_feature (1)...(307): n=A,T,C or G
cntcgnggngttggttgtgtgggntnttctcgggtgattgggtgnnattactggacccaaccnncgtggaaanggctgggnncgcggccgntctngcagaagtatcccgatttttttttttttttttttttttttggnggagggaaanttncagacatagctttattgctgactcctgcccccttcanagccctagtcacaggcnncagggntgttttgtaanttaaantttcnggaaaatnggngtntttntgcatncaanagaagggntgccaaangnggggtattgcttctgggtggnttaccc

SEQ ID NO: 815 - DNA, 784 bp, Homo sapiens
  misc_feature (1)...(784): n=A,T,C or G
ggcacgagatataatcagactcttactcctgtacttctagaaatgatgcaaacacttcaaggacccacaaatgtggaagatatgaatgcactgttaatcaaagatgctgtgtataatgctgttggattaagctgcttatgagctctttgacagtgttgattttgatcagtggtttaaaaaccagcttcttccagaattacaagtcattcacaataggtataagccattgcgacgcagggtgatttggctcatcggtcagtggatttctgtgaaattcaagtctgacttaagacccatgctttatgaagcaatctgtaacttgcttcaagatcaagatttagtggccgtattgaaacagctacaactttgaagttaactgttgatgattttgaatttagaacagatcagtttctaccgtatttggaaaccatgttcacactactttttcagttactgcagcaagttacagaatgtgacacaaagatgcatgttttgcatgtcctttcttgtgtgatcgaaagagtcaacatgcagatacgaccatatgtgggatgtttggtacaatatttgcccctcctttggaagcagaagtgaanaacacaatatgttgagatgtgctattttgaccacacttattcatcttggtcagggattangagcagacagcaagacctgtccctttcctgctccagttattcactgagtaccagatgtttcacagccttcncatgtttatttttctggaaaatgggttaaaaatatnggtangaacctttgggaaaac

SEQ ID NO: 816 - DNA, 813 bp, Homo sapiens
  misc_feature (1)...(813): n=A,T,C or G
ggcacgagcaggctgggaagaagtccttgcttctcaaggccacgtaccggccgcgtccttccacccttgccctttaaaccacagatgccaaatgatacgccaacagacactacattccccagcagctgctgccagagccctcttgtagcttctttattttctgtttctttccagctttcctaccctcctatccccccttgtgtttgggccacaattttgaaataatttttattataggtatgtgctgccaaagccagatttttataaggtaaaataaattaagaatttaaacagtaaaagccagtgtctcaaaatgtcagcattaaaatgtgaaggggacagcagggtgtgaaccggaaacacacattgccaaacagttgccaactgaactgctgcttctcatggtccgttcttttctttgcccttaaggtcaatgccagtgtccagacgagcagtgtagaaaagctccctgtgtggtttgtcgtgaggtctgcttgtatctcttcactggcgttagtttcattagctctttattctccttacgttcgagtgaatctgccaagaacactggtggatagtattatcctaacacttttggtttgggggcggggagggggcagggaatagtgagctggctttaccaccttcaggatctcgaattgggcgcttgaacctaagaaagattgtggacttatcaaaagtcaccgctcagtgttcgtcaagcatgtatttatgtgacnatcatactagggaggggatggttgggaattcttccatgtgcaaatttngncccgcaanaagcaaaactggngt

SEQ ID NO: 817 - DNA, 229 bp, Homo sapiens
  misc_feature (1)...(229): n=A,T,C or G
gaaacttttacattaatgatttattaaaanaaacaactccttgtcccactccactgngctgcttgtaatctccatacatggcctccattttcaactgttttnttggtcacanagctccaaacanacacatttttttttccaggtaaaagctgtttttagtttgtagtacaaatgtgactgcatccaatactgacacattgttcctttggcccacagtcccantcaccac

SEQ ID NO: 818 - DNA, 781 bp, Homo sapiens
  misc_feature (1)...(781): n=A,T,C or G
ggcacgaggtgtgtgtgtgtgtgtgtgtgtaacacatgggcattggtccttccaggacaacttggttagggctccagggtggcctctcaggcaggaacaggcttttttcctcctgtcttttcctcacatcacgtcctgccccaggtcactgcataaataagtgctttggaaagtattcatctagaaagtaacataaatactgtacatagaaaagggttgccgccccttagccttcgcactgccccagagagctctccacatattgcacacggcctccccagccctgtggggtccaggcctggctgtgtctttggtagaagcttcagggacagttcctgggcagcccccacatctncaccctgctcccaaaggggagctctagggtagtcagtgggtaccagaagccttgctcggcctcgctggtggccttctaccanggatgctttcacaaggatgagacagaatcccaatggtatgcccctgcttggacactctgctcaaggtctgcatgtggcctgggaggagacaggcaggctganggcaggtggacaggtgantcctggccacanaaggcaggctcacacccttcacangaataggtggtttgngctgtcatctcggcccacggtctcctnntgcgccacccccccttnntgaatcgnaantcctcaaancccttaccaccacttgatgaccnancatttttanggcctggcttgaaggngggggccttnggccccccnaagggggaaatncccccggnngaatncccaanggggaa

SEQ ID NO: 819 - DNA, 199 bp, Homo sapiens
  misc_feature (1)...(199): n=A,T,C or G
cnnngtggaaanggctgggnnngcggccgttttcgnngtagtatcgcgnttttttttttttttttgtgggaggttntgcngtntttgnttgctctctcaaattccaggaattgacttatttaattaatgcctgcaacctgtgctagcaaatatttgnacaaaacnanttgtgttggngatgttcttttgggtcgggcag

SEQ ID NO: 820 - DNA, 211 bp, Homo sapiens
  misc_feature (1)...(211): n=A,T,C or G
nnnggcacgaggagagagagagagagagagagagagagagagagagagagagagagagagagagagagagagagagagagagagagagagagagagagagagagagagagagagagagagagacagtnctntgtgtgtctctctgtctcnaagtacncnctgaggnatctgntntctgtntntgngtacacngtatctctcntggncatat

SEQ ID NO: 821 - DNA, 952 bp, Homo sapiens
  misc_feature (1)...(952): n=A,T,C or G
nnntcaggctcctggatgagccctgcganagagggtggcagcacggagagagctgctggaggcagcagagcaccaaggaaacatccagacatgcgcggcccggcccatccgctcccggaacagcaccaagacgaaatgggaaactacatgtccccaggttcgaggctgcaggggcagactctggtgtgaacaggggggatgtgaccacctaaggaaaaggtcacacctgtcttggtatcaggggctcaagagctctcaaaaatgtaaggggccgacagtcccctgccccaggcctgatcacaactccagggtcatgaggtcagagtaaagtgcagaggtttttaaacataaccaaaatttcaggagaggccaattcttacttgaaagagcaacaccctggggcgctgcttgccattacttcctcatctttagcaacacatttgcttttcaaggtgttccttgtggaaacacacatacacatagacacatgcccctcagatgtcccctgccccctgattagtagaatgtggggtttccacaatgagcagaaactgatccaattttggttaagtttgagaagccctctgaatttgggtggttggcccaatgtaaatacttccgcagagatggagggcattcaaaacaggttctgaaaggatccagcctatcttggactttgttctggaanccanggattcagcnttggccacctgtgccaggcttgcaaggcctggtgtgaacncccaaantggcagcaaaaacaacanacagccnctgcactttggntggaccaacgtttggcctnaacaaatctngcgggttgggatnttcttgntttcncncccaggggaccnaaaacccccntacntgnaataaccntttttttttnnaaccntttanccantgggnttnccnaaaaaacttgnccccttttttttnccaanggnaaaat

SEQ ID NO: 822 - DNA, 587 bp, Homo sapiens
  misc_feature (1)...(587): n=A,T,C or G
ggcacgagaactagtctcgagttttttttttttttttttaacatttctgaattttattatttttagggaagacacgcagtttcacaagaaacaatgatttttctcaaacaatagaaaaaaaggtctttttgaaaaatccactgtcttagatgaaaagtctacccagcaagcactggggcagttctgagagtagaaaccagtgtggtggaagttacttataggaagttcagtgcagaggtctccacaagtcctgattagttctgnaaggctccattgggccagctcagggtaacagtgggaatgagctcacagacaaaggcaggcaccagttcctntgcccgggatgcaggctggctcactccccangcggntgcatcttgcttcagactcatcaaactgctgctgtccanctncgncatgactntgttgagaacatanaactctgctctctggctttgcttcanctcctggtgggcnnaattctgcttagccttctncactntgaaggntgggtctttaacttttggatttttttttccnggcagggggaaccatgaatggggtacatacccacncngggntttggc

SEQ ID NO: 823 - DNA, 264 bp, Homo sapiens
  misc_feature (1)...(264): n=A,T,C or G
ntcnatncctactangncaaactgactccgccctnagncacctngtggtccanggctgcggagctgcgatacagccttccgcgggtctgntggaaccccgacctntcntggtgtntntccntcccncnccccaacccgccaagggcctgcctttcctnctgggcctttgccagcgntnggccanaccggggccaaaccggnccccgggcacattttaaccnagggcncncttntagaanaaaaccccggntgatgttataaagg

SEQ ID NO: 824 - DNA, 520 bp, Homo sapiens
  misc_feature (1)...(520): n=A,T,C or G
tcaagcngcccccantntgatggatatctgcaaaattcnccctttcaccggccgcccgcngcatgtcttattatacaacanatccaacttccctaagnggntcacacatnntaaggtattgttaacaaaataggaaantctattngaactaacaatcatctctttgaatctgcntatcccattaaaagcattttcctcaatattcctcatatcggttatggncaatggatacccatctgagctggttganccctttaaattnattatacttaactttttgaaggctgttatacccaagggacaaacctaancaaccancagatatacttganggtntctcctgtnatttctcagattccaatataccattttgccttnacacctacagcccttaggggcatcctcnttccncanaacaaancattntcactaagacagnctggggtnntncaccaatggctaccaaacctctgnccgcnacccaccgcntaaanggcngaaattnccnanccacacgggt

SEQ ID NO: 825 - DNA, 2064 bp, Homo sapiens
cggtgcgctgagcgccggaggagcgtaggcagggcagcgctggcgccagtggcgacaggagccgcgcgaccggcaaaaatacacgggaggccgtcgccgaaaagagtccgcggtcctctctcgtaaacacactctcctccaccggcgcctccccctccgctctgcgcgccgcccggctgggcgcccgaggccgctccgactgctatgtgaccgcgaggctgcgggaggaaggggacagggaagaagaggctctcccgcgggagcccttgaggaccaagtttgcggccacttctgcaggcgtcccttcttagctctcgcccgcccctttctgcagcctaggcggcccgggttctcttctcttcctcgcgcgcccagccgcctcggttcccggcgaccatggtgacgatggaggagctgcgggagatggactgcagtgtgctcaaaaggctgatgaaccgggacgagaatggcggcggcgcgggcggcagcggcagccacggcaccctggggctgccgagcggcggcaagtgcctgctgctggactgcagaccgttcctggcgcacagcgcgggctacatcctaggttcggtcaacgtgcgctgtaacaccatcgtgcggcggcgggctaagggctccgtgagcctggagcagatcctgcccgccgaggaggaggtacgcgcccgcttgcgctccggcctctactcggcggtcatcgtctacgacgagcgcagcccgcgcgccgagagcctccgcgaggacagcaccgtgtcgctggtggtgcaggcgctgcgccgcaacgccgagcgcaccgacatctgcctgctcaaaggcggctatgagaggttttcctccgagtacccagaattctgttctaaaaccaaggccctggcagccatcccacccccggttccccccagtgccacagagcccttggacctgggctgcagctcctgtgggaccccactacacgaccaggggggtcctgtggagatccttcccttcctctacctcggcagtgcctaccatgctgcccggagagacatgctggacgccctgggcatcacggctctgttgaatgtctcctcggactgcccaaaccactttgaaggacactatcagtacaagtgcatcccagtggaagataaccacaaggccgacatcagctcctggttcatggaagccatagagtacatcgatgccgtgaaggactgccgtgggcgcgtgctggtgcactgccaggcgggcatctcgcggtcggccaccatctgcctggcctacctgatgatgaagaaacgggtgaggctggaggaggccttcgagttcgttaagcagcgccgcagcatcatctcgcccaacttcagcttcatggggcagctgctgcagttcgagtcccaggtgctggccacgtcctgtgctgcggaggctgctagcccctcgggacccctgcgggagcggggcaagacccccgccacccccacctcgcagttcgtcttcagctttccggtctccgtgggcgtgcactcggcccccagcagcctgccctacctgcacagccccatcaccacctctcccagctgttagagccgccctgggggccccagaaccagagctggctcccagcaagggtaggacgggccgcatgcgggcagaaagttgggactgagcagctgggagcaggcgaccgagctccttccccatcatttctccttggccaacgacgaggccagccagaatggcaataaggactccgaatacataataaaagcaaacagaacactccaacttagagcaataacggctgccgcagcagccagggaagaccttggtttggtttatgtgtcagtttcacttttccgatagaaatttcttacctcatttttttaagcagtaaggcttgaagtgatgaaacccacagatcctagcaaatgtgcccaaccagctttactaaagggggaggaagggagggcaaagggatgagaagacaagtttcccagaagtgcctggttctgtgtacttgtccctttgttgtcgttgttgtagttaaaggaatttcattttttaaaa

SEQ ID NO: 826 - DNA, 2109 bp, Homo sapiens
tggcgccagcggcgacaggagccgcgcgaccggcaaaaatacacgggaggccgtcgccgaaaagagtccgcggtcctctctcgtaaacacactctcctccaccggcgcctccccctccgctctgcgcgccgcccggctgggcgcccgaggccgctccgactgctatgtgaccgcgaggctgcgggaggaaggggacagggaagaagaggctctcccgcgggagcccttgaggaccaagtttgcggccacttctgcaggcgtcccttcttagctctcgcctgcccctttctgcagcctaggcggcccaggttctcttctcttcctcgcgcgcccagccgcctcggttcccggcgaccatggtgacgatggaggagctgcgggagatggactgcagtgtgctcaaaaggctgatgaaccgggacgagaatggcggcggcgcgggcggcagcggcagccacggcaccctggggctgccgagcggcggcaagtgcctgctgctggactgcagaccgttcctggcgcacagcgcgggctacatcctaggttcggtcaacgtgcgctgtaacaccatcgtgcggcggcgggctaagggctccgtgagcctggagcagatcctgcccgccgaggaggaggtacgcgcccgcttgcgctccggcctctactcggcggtcatcgtctacgacgagcgcagcccgcgcgccgagagcctccgcgaggacagcaccgtgtcgctggtggtgcaggcgctgcgccgcaacgccgagcgcaccgacatctgcctgctcaaaggcggctatgagaggttttcctccgagtacccagaattctgttctaaaaccaaggccctggcagccatcccacccccggttccccccagcgccacagagcccttggacctgggctgcagctcctgtgggaccccactacacgaccaggggggtcctgtggagatccttcccttcctctacctcggcagtgcctaccatgctgcccggagagacatgctggacgccctgggcatcacggctctgttgaatgtctcctcggactgcccaaaccactttgaaggacactatcagtacaagtgcatcccagtggaagataaccacaaggccgacatcagctcctggttcatggaagccatagagtacatcgatgccgtgaaggactgccgtgggcgcgtgctggtgcactgccaggcgggcatctcgcggtcggccaccatctgcctggcctacctgatgatgaagaaacgggtgaggctggaggaggccttcgagttcgttaagcagcgccgcagcatcatctcgcccaacttcagcttcatggggcagctgctgcagttcgagtcccaggtgctggccacgtcctgtgctgcggaggctgctagcccctcgggacccctgcgggagcggggcaagacccccgccacccccacctcgcagttcgtcttcagctttccggtctccgtgggcgtgcactcggcccccagcagcctgccctacctgcacagccccatcaccacctctcccagctgttagagccgccctgggggccccagaaccagagctggctcccagcaagggtaggacgggccgcatgcgggcagaaagttgggactgagcagctgggagcaggcgaccgagctccttccccatcatttctccttggccaacgacgaggccagccagaatggcaataaggactccgaatacataataaaagcaaacagaacactccaacttagagcaataacggctgccgcagcagccagggaagaccttggtttggtttatgtgtcagtttcacttttccgatagaaatttcttacctcatttttttaagcagtaaggcttgaagtgatgaaacccacagatcctagcaaatgtgcccaaccagctttactaaagggggaggaagggagggcaaagggatgagaagacaagtttcccagaagtgcctggttctgtgtacttgtccctttgttgtcgttgttgtagttaaaggaatttcattttttaaaagaaatcttcgaaggtgtggttttcatttctcagtcaccaacagatgaataattatgcttaataataaagtatttattaagacttt

SEQ ID NO: 827 - protein, 394 aa, Homo sapiens
MVTMEELREMDCSVLKRLMNRDENGGGAGGSGSHGTLGLPSGGKCLLLDCRPFLAHSAGYILGSVNVRCNTIVRRRAKGSVSLEQILPAEEEVRARLRSGLYSAVIVYDERSPRAESLREDSTVSLVVQALRRNAERTDICLLKGGYERFSSEYPEFCSKTKALAAIPPPVPPSATEPLDLGCSSCGTPLHDQGGPVEILPFLYLGSAYHAARRDMLDALGITALLNVSSDCPNHFEGHYQYKCIPVEDNHKADISSWFMEAIEYIDAVKDCRGRVLVHCQAGISRSATICLAYLMMKKRVRLEEAFEFVKQRRSIISPNFSFMGQLLQFESQVLATSCAAEAASPSGPLRERGKTPATPTSQFVFSFPVSVGVHSAPSSLPYLHSPITTSPSC

SEQ ID NO: 828 - DNA, 453 bp, Homo sapien
ggatcatttaattgcatactctatgaccacgcacatgtaaagccccttctgcaaaagagacctaaaccagatgagaagtattattcatccagcatatggggaccaacatgtgatggcctcgatcggattgttgagcgctgtgacctgcctgaaatgcatgtgggtgattggatgctctttgaaaacatgggcgcttacactgttgctgctgcctctacgttcaatggcttccagaggccgacgatctactatgtgatgtcagggcctgcgtggcaactcatgcagcaattccagaaccccgacttcccacccgaagtagaggaacaggatgccagcaccctgcctgtgtcttgtgcctgggagagtgggatgaaacgccacagagcagcctgtgcttcggctagtattaatgtgtagatagcactctggtagctgttaactgcaagtttagct

SEQ ID NO: 829 - DNA, 452 bp, Homo sapien
ctgggccacgaggacaccaccagcttggatcggcctcgccgtgtggaatactttgtagataagcaactccaagtaaaggctgtcacctgtgggccgtggaacacctacgtgtatgctgtggagaaagggaagagctgacatgtgtacgtatatgtatatgcaacacctgtgagacccccattcaggtcaaggaaaaccgttgcctgcaccccaagggccccatatttgcccctccccatcacagtcctgcccttcaccctcaagcacggtcctaaacttgtctgcactttagaaacacctggagagcattgaaaactctgctgcctaaggtcagcatcaatcaaaacaatgaaatcaatgaaacaatgaaaccagagcttctaggtgtgtggcctggatagtggtagattcaaagctccacccacctcatcccaggtacatttgatgtgcag

SEQ ID NO: 830 - DNA, 450 bp, Homo sapien
ctgacccccctttgtccacagctaagatggcagcagaatgctatgtcactatatacagaaacaagacaacctgaagctaaatggatgccccctgcagagtcaacaggtccagcctcacagtgcacgccctgagctacagcctctcccaaaaggcatcttccccacagcctcaacgccgagcaaggagcatcaagggtttgtctcggttgttttgttctttttacaaactatagatatatacagttgaaaactcaggatttctagccaataaccatagttaccaccaccttacaaataaaaagaaaatgccagaaacatctttaaatgccttgtcacaccaacagcaaagtgcacagagtgaggagaacacgagagtgccttttcattttaaaaatgtttggaaatatgtacaactttgatacagtttcagggtgctccagacacccatgg

SEQ ID NO: 831 - DNA, 395 bp, Homo sapien
ctctaaacccctccacattcccgcggtccttcagactgcccggagagcgcgctctgcctgccgcctgcctgcctgccactgagggttcccagcaccatgagggcctggatcttctttctcctttgcctggccgggagggccttggcagcccctcagcaagaagccctgcctgatgagacagaggtggtggaagaaactgtggcagaggtgactgaggtatctgtgggagctaatcctgtccaggtggaagtaggagaatttgatgatggtgcagaggaaaccgaagaggaggtggtggcggaaaatccctgccagaaccaccactgcaaacacggcaaggtgtgcgagctggatgagaacaacacccccatgtgcgtgtgccaggaccccaccag

SEQ ID NO: 832 - DNA, 291 bp, Homo sapien
ctgactcttccatctgtgcaggttgactgaggtcattcctgagttgcagtatgttgagagggtaatatttctgtcttctctaactccccatactcccttgtcttccactctccacttaggagttttttgtgagttatgtccttgttgcttttgcctctttttctttctagccttgattgtgccagaagacaatgtccctattcacacactctttctgcttttctgtgggcaggaacatggaaggggtgctgatggacgtggactgtgagagcgtctaccccactgtgtagg

SEQ ID NO: 833 - DNA, 491 bp, Homo sapien
ctgtagcttctgtgggacttccactgctcaggcgtcaggctcaggtagctgctggccgcgtacttgttgttgctttgtttggagggtgtggtggtctccactcccgccttgacggggctgctatctgccttccaggccactgtcacggcttccgggtagaagtcacttatgagacacaccagtgtggccttgttggcttgaagctcctcagaggagggcgggaacagagtgaccgagggggcagccttgggctgacctaggacggtcagcttggtccctccgccgaagaccacattattgccgtcccacgtctgacagtaatagtcagcctcatccatagcctgggtcccgctgatggtcagagtggctgtgttcccagagttggagccagagaagcgctcagggatccctgaagaccgcttattatcttgataaatgactaccacaggggactggcctggcttctgttgataccaacaagcagatacctg

SEQ ID NO: 834 - DNA, 308 bp, Homo sapien
ctggtcgaggtccacgccgcggtaggtgaacttgcggaaggtccgcttcttcttctgctctacttctgccgtgctggagaacatcgaactgaacaagaagagtatgtattcccgtgtgccagagtgccaggtcaccacatactattatgttgggttcgcatatttgatgatgcgtcgttaccaggatgccatccgggtcttcgccaacatcctcctctacatccagaggaccaagagcatgttccagaggaccacgtacaagtatgagatgattaacaagcagaatgagcagatgcatgcgctgctgg

SEQ ID NO: 835 - DNA, 472 bp, Homo sapien
  misc_feature (1)...(472): n = A,T,C or G
ctgacatgttaactgtgatgcataaaactcgatcttctgatggggagtaagtgcagaaggtagaaatctccgccccgcgggggcttatctgtactggtagttcatgctgtggtctgcgtttctgccatagccgccttgtgaggactggtaggagctgggagggccactgtagttctggccggaccccggggagttgtagttcgactgtgagtagcctccttgtttgccttggtatgaggagccgcccccagaacctccgccgtagcccccgtgtgaccctgggttgtaggatgccccgcctgagccgtagctgttcccgccgcttcggcctccactaccactgtagttgaatttgctctcgtagntgtagtcggatccgcccccgcccccgggagagttgtngganttcgagtaggagtagctgccttgtccatggttatagcctttctgcttgccctgtggagggccatag

SEQ ID NO: 836 - DNA, 354 bp, Homo sapien
ccagtgcaaccttcagatagacacatggtgaccagagcccgccaggcttctgcaggtggcagtgtcgagcaagtgtaagatgtctgtgggaaggagaagctcctgaaatgaacgttctgcaaacagaaggctgaggggtcttccaggcatgtccagtcactaggagctgccaccggtgggcttgagtgccaggctctaggctttgtgcagaaagcacccggggcggggggcggtaagggagagcaaaatgggtctctctcaactgcagtcagtgctcctgggaacacggtctcacagacagcacatattctacgtcacagctctagggtttcaaggacttagccatccgacagg

SEQ ID NO: 837 - DNA, 318 bp, Homo sapien
  misc_feature (1)...(318): n = A,T,C or G
ctgaaaatgaaggtaattaaaaccatggaggcgatcagcgaggttctccaggaccttaggtttgatgcggaatctgccgagtgatggcggctccccagggatgcgccgagggagatgggaaacggggcggatggcgcccagcccagccctaactgccagccacattgaagcggacattggcaaccgggtccccagccatgcgcagaaccgtgggtagcatgtgcttggtggtgatgtcctgcccacagacctcagacggcacattgatgcagaagagcgtantcatgcggtgcaggtagttggggtctccggacatgg

SEQ ID NO: 838 - DNA, 277 bp, Homo sapien
ctgcgcgtcgccaaagtgacaggcggtgcggcctccaagctctctaagatccgagtcgtccggaaatccattgcccgtgttctcacagttattaaccagactcagaaagaaaacctcaggaaattctacaagggcaagaagtacaagcccctggacctgcggcctaagaaggcacgtgccatgcgccgccggctcaacaagcacgaggagaacctgaagaccaagaagcagcagcggaaggagcggctgtacccgctgcggaagtacgcggtcaagg

SEQ ID NO: 839 - DNA, 276 bp, Homo sapien
ccaaggaatgcaggctgtactatctgcgaaatggagaacgtatttcagtgtcggcagcctccaagctgctgtccaacatgatgtgccagtaccggggcatgggcctctctatgggcagtatgatctgtggctgggataagaagggtcctggactctactacgtggatgaacatgggactcggctctcaggaaatatgttctccacgggtagtgggaacacttatgcctacggggtcatggacagtggctatcggcctaatcttagccctgaagagg

SEQ ID NO: 840 - DNA, 453 bp, Homo sapien
  misc_feature (1)...(453): n = A,T,C or G
ccttctttgccatgaccaagctctttcagtccaatgatcccacactccgtcggatgtgctacttgaccatcaaggagatgtcttgcattgcagaggatgtcatcattgtcaccagcagcctaacaaaagacatgactgggaaagaagacaactaccggggcccggccgtgcgagccctctgccagatcactgatagcaccatgctgcaggctattgagcgctacatgaaacaagccattgtggacaaggtgcccagtgtctccagctctgccctcgtgtcttccttgcacctgctgaagtgcagctttgacgtggtcaagcgctgggtgaatgaggctcaggaggcagcatccagtgataacatcatggtccagtaccacgcactanggctcctgtaccatgtgcgtaagaatgaccgcctagccgtcaataagatgatcagcaaggtcgcac

SEQ ID NO: 841 - DNA, 142 bp, Homo sapien
agcctctctagtggcagagcagctcacactccctccgctgggaacgatggcttctgcctagtacctatccttgtgtttctgatgcagtggtagcattggttcaagttctctcctgctgtggtcagagttgcttcgatgttgg

SEQ ID NO: 842 - DNA, 83 bp, Homo sapien
cctaaaagcagccaccaattaagaaagcgttcaagctcaacacccactacctaaaaaatcccaaacatataactgaactcccc

SEQ ID NO: 843 - DNA, 482 bp, Homo sapien
ccatcggtgtctggcagatgcggcacctcaagagcttctttgaagccaagaagcttgtgtagctgtcccaggcgtcacaacccatcctcccaggctgggggagaaaggacctcctggaactgacttcttctgtcaggaggactggtttccagccatacctgttctggaagggagaggggctggaggcacccacaggcacaagctgaaggcagcagcttggctaatactgagcaggtagtggggcaaattcctgccctctctctctggcctctgggccgtttggtagtaatcacccaggggctggtaaagcccctcctcttggcacctcagaatcacagtgttactgatcagggatgtgaggctgctgttgggggtggggggaggggaatgggcaggcaagccagtcttctgtcttcctttgctaacttagggttttgagcaggttgggggtatggtgcctgtcatacccacctgccaccctg

SEQ ID NO: 844 - DNA, 534 bp, Homo sapien
  misc_feature (1)...(534): n = A,T,C or G
ccagatttttcaagtttaaaggaggaaactgcttattggaaggaactttccttgaagtataagcaaagcttccaggaagctcgggatgagctagttgaattccaggaaggaagcagagaattagaagcagagttggaggcacaattagtacaggctgaacaaagaaatagagacttgcaggctgataaccaaagactgaaatatgaagcggaggcattaaaggagaagctagagcatcaatatgcacagagctataagcaggtctcagtgttagaagatgatttaagtcagactcgggccattaaggagcagttgcataagtatgtgagagagctggagcaggccaacgacgacctggagcgagccaaaagggcaacaatagtttcactggaagacttttgaacaaaggctaaaccaggccattgaacgaaatgcatttttagaaagttgaacttgatgaaaaaggaatctttgttggtctctgtacagaggttnaaggatgaagcangagatttaaggcaagaactagcagtt

SEQ ID NO: 845 - DNA, 175 bp, Homo sapien
tcgacctgtggcaaatgtggctaccctgccaagcgcaagagaaagtataactggagtgccaaggctaaaagacgaaataccaccggaactggtcggatgaggcacctaaaaattgtataccgcagattcaggcatggattccgtgaaggaacaacacctaaacccaagagggcag

SEQ ID NO: 846 - DNA, 179 bp, Homo sapien
cgcgtggacagttgcgaggggtctgtgtgaaggcacttgtcacgagcttcaatactgccgccgtcccaggatgggagaactgcgcagcaggaagggcacttctgaaagcacagtggagagatcgctggagcgggcgttctgggcaggaggaagcacagacggcaggcagggtggactgg

SEQ ID NO: 847 - DNA, 410 bp, Homo sapien
ccaccaaaaccagtcacaagacctggagttgtctgtgcagatgtacgcccaagccgccctggatggagactcccagggattttttaacctggccctgctaatcgaggaaggtacgataatcccacaccatatcttggatttcttggaaattgactcaactctccattctaataacatctccattctccaggaactgtacgaaaggtgctggagccacagtaacgaggagtccttcagcccctgctccttggcctggctttacctgcacttgcggcttctctggggtgctatcctgcactcagccctgatctactttctgggaacctttctgctatccatattgatcgcctggactgtgcagtatttccagtctgtctcagcaagcgatccccctccaagaccatcccagg

SEQ ID NO: 848 - DNA, 557 bp, Homo sapien
  misc_feature (1)...(557): n = A,T,C or G
cacgggcccccagccctgtgtcggccttgtctgtctcagctcaaccacagtctgacaccagagcccacttccatcctctctggtgtgaggcacagcgagggcagcatctggaggagctctgcagcctccacacctaccacgacctcccagggctgggctcaggaaaaaccagccactgctttacaggacagggggttgaagctgagccccgcctcacacccacccccatgcactcaaagattggattttacagctacttgcaattcaaaattcagaagaataaaaaatgggaacatacagaactctaaaagatagacatcagaaattgttaagttaagctttttcaaaaaaccagcaattccccagcgtagtcaagggtggacactgcacgctctggcatgatgggatggcgaccgggcaagctttcttcctcgagatgctctgctgcttgagagctattgctttgttaagatataaaaaggggtttctttttgtctttctgtaaggnggacttccagcttttgattgaaagtcctagggtgattctatttctgctg

SEQ ID NO: 849 - DNA, 525 bp, Homo sapien
ctgatggtttggaaatgagagaactacagtggtgaagagaccaggaggcagctctcagtgaaaccaacattgcggatgcccttcgtgagccttctcagtcccagcaggaagcccacaacactggcctccccagcctgcctgctgacaacacctaggcttactttatctaaaatcagagtgtaccaggtctgtagcagaaaataatcaactaaatgtcagggacctatgagtcatttaaaacaaaagaggaagtgaaagccattaggcaagctatgtgctgggctgctaacgtagcccctgcagggaggggtcaggagcgcgctgcagtgagccttgggtctcgcaggcccagccctgctgcaaggagccagggcacccaggaaacatcagcacacacacacacagggaccctcccttcatgtcacttgttttgctgccctaaatggcttcttgcaccctaacccctgatcctggaagaaggcagagagactggcccgtacagagacctgcaattctacgcaagct

SEQ ID NO: 850 - DNA, 384 bp, Homo sapien
cctcttggagcacatcctttactgcattgtggacagcgagtgtaagtcaagggatgtgctccagagttactttgacctcctgggggagctgatgaagttcaacgttgatgcattcaagagattcaataaatatatcaacaccgatgcaaagttccaggtattcctgaagcagatcaacagctccctggtggactccaacatgctggtgcgctgtgtcactctgtccctggaccgatttgaaaaccaggtggatatgaaagttgccgaggtactgtctgaatgccgcctgctcgcctacatatcccaggtgcccacgcagatgtccttcctcttccgcctcatcaacatcatccacgtgcagacgctgacccaggagaacgtcag

SEQ ID NO: 851 - DNA, 423 bp, Homo sapien
ctcaggaaaaaccagccactgctttacaggacagggggttgaagctgagccccgcctcacacccacccccatgcactcaaagattggattttacagctacttgcaattcaaaattcagaagaataaaaaatgggaacatacagaactctaaaagatagacatcagaaattgttaagttaagctttttcaaaagatcagcaattccccagcgtagtcaagggtggacactgcacgctctggcatgatgggatggcgaccgggcaagctttcttcctcgagatgctctgctgcttgagagctattgctttgttaagatataaaaaggggtttctttttgtccttctgtaaggtggacttccagcttttgattgaaagtcctagggtgattctatttctgctgtgatttatctgctgaaagctcag

SEQ ID NO: 852 - DNA, 413 bp, Homo sapien
ctgaaaacagtgggaggccagatgctggcatcttccagacgggagcatagccatggtcactctagccgatgtctcctggggctctcaggcggcaaggaccagatgcaccactactgtccaatcccagttttacttagagccacctccttttttggggccattagtccttatttcatgccagattttcactagcggctccctgttcttccaaatcaattcatgaccgtaagtaacataccatattccaaaaagagctcccccaagatgtgccgcatgatcaaaaaatttccatcccaggatcattcctgctgtatccatggcgataatggctttcagggcattccctgctgtgaacgtgaacatcggaaggaaaataatggcaagcctcccttctgggatcttagtgcagacag

SEQ ID NO: 853 - DNA, 288 bp, Homo sapien
atctgtgagttctgagaggcatttaggccatgggacagggaggatcctgtctggccttcagtttccatccccaggatccacttggtctgtgagatgctagaactccctttcaacagaattcacttgtggctattagagctggaggcacccttagccacttcattcccctgatgggccctgactcttccccataatcactgaccagccttgacactccccttgcaaaccatcccagcactgcaccccaggcagccactcctagccttggcctttggcatgagatggggg

SEQ ID NO: 854 - DNA, 427 bp, Homo sapien
ccaagtgagatcagccctcaagggcacatgccaagggcagagcagcccatgtagacagcttcggagggcatgggggtgtagggagttcggggtagctcctcattaactatttgttgggtgagtaaaggggtgaggctcagtggcaggtacctctgcaatgacaagctgcctcccctctatgtgtttagcatatgttattagaacgtgtccgacacccctaccgctgccatttgggccctttaataaagccaagtagagaaatctggcaataaaaggcaaatgtaagcatgctttctttaagacgcatcataaatggttttctttaagtgaatggaagagtttgacagagatacacctttgtaagaaaacattaagaatgctggctgactgtggtggctcacacctgtattcccagcactttgggagg

SEQ ID NO: 855 - DNA, 311 bp, Homo sapien
ccagtattcctggaggatataacactgacatcagcagggttttcaatggcaacaattgcacgagctgccagcagaagcttctcccaggtcctcttgagatttatgatatagatgccatcacttttccttttatagatgtactgttccatctggaagtcaagattggtgccacctaagtgggttcctgctgcaaggaacttaaggacatcctcctccttcatttgcaggacatcaagggctccggacattgtgaaagtttccctttaagttacgacgggaatccagaacaacgccgtatggacccctctgca

SEQ ID NO: 856 - DNA, 328 bp, Homo sapien
cctatggaagtttggtgctttgctccctgtgtttgcgaaacaggtatctcgtgatttcagaaaagcttgaggagattaagtctttccgggagctgacctgcctggatctttcctgttgcaagcttggagatgagcatgaacttctagaacatctcaccaatgaagccctgtctagtgtaactcagctccacctgaaggataattgtctatctgatgctggggtgcggaagatgacagcaccagttcgagtgatgaaaagaggtatccaatgcctgcatctgtgatctcagggttacatgataagtctaataatgttagattctcaagg

SEQ ID NO: 857 - DNA, 502 bp, Homo sapien
  misc_feature (1)...(502): n = A,T,C or G
ctgaccggaccggtcatgcccgtccggaacgtctataagaaggagaaagctcgagtcatcactgaggaagagaagaatttcaaagccttcgctagtctccgtatggcccgtgccaacgcccggctcttcggcatacgggcaaaaagagccaaggaagccgcagaacaggatgttgaaaagaaaaaataaagccctcctggggacttggaatcagtcggcagtcatgctgggtctccacgtggtgtgtttcgtgggaacaactgggcctgggatggggcttcactgctgtgacttcctcctgccaggggatttggggctttcttgaaagacagtccaagccctggataatgctttactttctgtgttgaagcactgttggttgtttggttagtgactgatgtaaaacggttttcttgtggggaggttacagaggctgacttcagagtggacttgtgttttttctttttaaagangtaaggttgggctggtgctcacagacctc

SEQ ID NO: 858 - DNA, 411 bp, Homo sapien
cggccgaggtccttaatagttaagttacagctaagaatgtcatgtcttgggttggaattttcatttttagcaccgttaatgtattcacttaaatctatgttagcaccttgtctccaggcagaacaacaaaccatccaaacattttaaacattgggggaaacacgaaggggagggttaaagacagaatccagtactgtggaaggagtggatttagatcacaagatccttgtcgatatccttctgcttgatgccgaagcagccggcccactcatccagggcgatgtacttgtcattgtccaggtcacaggtctcgaaaaagcgggtggtgcaatgctccatggggatgaggggagcacgcagtggagccagctcggtgtgggagaggtacccgtcaatggggtgctggtccag

SEQ ID NO: 859 - DNA, 232 bp, Homo sapien
aaatcacagagggacttagtattccattaatgcaaatggaaacattaagttcatcatcagatgataaaaggaaaaaaaaaacctgatactcatctcaaaagacgcagagaagacatctgcataaatccagtacctattattatttcaaatttaaaaacttcttcttttttaagagatagggtatcactatgttgcccaggctgatcttgaactcttggcctcagatgatcct

SEQ ID NO: 860 - DNA, 235 bp, Homo sapien
  misc_feature (1)...(235): n = A,T,C or G
tgcccagaaaggaaggggctattgcctcctcccagccacgttccctttcctcctctccctcctgtggattctcccatcagccatctggttctcctcttaaggccagttgaagatggtcccttacagcttcccaagttaggttagtgatgtgaaatgctcctgtccctggccctacctccttccctgtccccacccctgcataaggcagttgttggttttcttccccaatnctttt

SEQ ID NO: 861 - DNA, 457 bp, Homo sapien
ccaaaggaaagttggaaggcaactgacagattctgccttttaggtacttgaactggcaggaaatgcatcaaaagacttaaaggtaaagcgtattacccctcgtcacttgcaacttgctattcgtggagatgaagaattggattctctcatcaaggctacaattgctggtggtggtatgttaacttctaacattttaaaaaatttcttcagaggaaggaattttttgctgcttttaattagtttttccaggagaggaaatttaagtatattttcaatgatggaagtatggttgtatcatgaaatttgatttatatgtataactcaatgaatttttacctcatacttgagctgcatgtttttaaagatacctttcaagttgaacagtatacactttcttggtttcaaatactgtgattttttaaaaaatcttaagtagaattaattcctgtcactcccc

SEQ ID NO: 862 - DNA, 561 bp, Homo sapien
ccaggtcatcaccattggcaatgagcggttccggtgtccggaggcgctgttccagccttccttcctgggtatggaatcttgcggcatccacgagaccaccttcaactccatcatgaagtgtgacgtggacatccgcaaagacctgtacgccaacacggtgctgtcgggcggcaccaccatgtatccgggcattgccgacaggatgcagaaggagatcaccgccctggcgcccagcaccatgaagatcaagatcatcgcacccccagagcgcaagtactcggtgtggatcggtggctccatcctggcctcactgtccaccttccagcagatgtggattagcaagcaggagtacgacgagtcgggcccctccatcgtccaccgcaaatgcttctaaacggactcagcagatgcgtagcatttgctgcatgggttaattgagaatagaaatttgcccctggcaaatgcacacacctcatgctagcctcacgaaactggaataagccctcgaaaagaaattgtccttgaagcttgtatctgatatcagcactggattgtagaact

SEQ ID NO: 863 - DNA, 291 bp, Homo sapien
ccatagctgtcccacctatggttttaaaaacagactgtaacttgatcttctgaaatccttctcgaaccacaactcgttctgttaaagaaatcctaggaaagaagtcctactgatattgtcgatagtctccaaaaggtgaggaaggtaactgagttgaaggcaactgggaggggtcttctgcaaactgaggaccattggaaaactgtgcagaggcaaatcttgtcaacaagataccagctccttcaattaaagctaggagaatgccacccattgcggctgacccaaccatgg

SEQ ID NO: 864 - DNA, 265 bp, Homo sapien
ctgaacttttccacctggagtccttgggaataccggacgtgatcttcttttataggtccaatgatgtgacccagtcctgcagttctgggagatcaaccaccatccgcgtcaggtgcagtccacagaaaactgtccctggaggtttgctgctgccaggaacgtgctcagatgggacctgtgatggctgcaacttccacttcctgtgggagagcgcggctgcttgcccgctctgctcagtggctgactaccatgctatcgtcagcag

SEQ ID NO: 865 - DNA, 144 bp, Homo sapien
cctccacctgcgttttgatctagatgagcatattgtccatctcccacagcttgctccggttccgcaggtacgcccgcccgtgctcgcgcgtcagcgacgcgatgtcctcgcgcatctcgttgatgaccgggagcagaaactgct

SEQ ID NO: 866 - DNA, 241 bp, Homo sapien
ctggctgtaagtagcttcatagcaccagtctttgagaatgtcaagctctccagaaatcatggcctccaggacattggggatgatgtcgttctcgcactgtttcagaaaccggtccttgtcaaaggccgggtccacccggaggatctccgtgagcacctccgacatctctgtcttggagaacaggccccccagcaagtcggtgaccttgtccgtaagggcccgggatgcccggatgaacgcg

SEQ ID NO: 867 - DNA, 364 bp, Homo sapien
cctgggcccgctgacttcagggtgaggccacagctactgcagcgctttttatttatttatttatttactgagatggagtcttgctctgtcacccaggctggagtgcagtggtgcaatctcggctcactgcaacctctgcctcctgggctgcagtgattctcctgcgttcaagtaattctcctgcctcggccttctgagtagttgggattacaggcatatgccaccacacttggctaatttttcgtatttttagtagaaatggggtttcaccatgttggcgaggctggtctcgaactcctgacctcaaggatcctcctgcctcggcctcctaaggtgctgggattgcaggtgtgagccaccacgt

SEQ ID NO: 868 - DNA, 472 bp, Homo sapien
ccaccagtccacagatgtgactggtaagggatctagtaacagaggatggagttgggcagaatattatcctggatgatatgcacccagcactaggatacacctttcattagaatgaagagaacagacaaagccctcagaaaagatacaaaggcagagacattgattagaacattatctcataacagaggtggggccattacccaccattattgtaaaataactgtaactaaccaaaacacatacaggcttctttaatggagttaataaaactatggcacattgggaatcaggggcagaggtactgttcccagacggaaaactgggataaagggagccatgctgacagggccttattccagtctaggttgttagaaaggagccctagcccagaaatgacagcaaatagccataatcattatgtggggctgaaccagaggaagccaggctgagccaagaagctggaagtatcttg

SEQ ID NO: 869 - DNA, 368 bp, Homo sapien
cctttcttgtaagtgaagaaaaaggaatgcagcaaagaagagttcgacattggagtccttagttccatcaggatcccattcgcagcctttagcatcatgtagaagcaaactgcacctatggctgagataggtgcaatgacctacaagattttgtgttttctagctgtccaggaaaagccatcttcagtcttgctgacagtcaaagagcaagtgaaaccatttccagcctaaactacataaaagcagccgaaccaatgattaaagacctctaaggctccataatcatcattaaatatgcccaaactcattgtgactttttattttatatacaggattaaaatcaacattaaatcatcttatttacatgg

SEQ ID NO: 870 - DNA, 411 bp, Homo sapien
ggcgtgtccttggacttagagagtggggacgtccggcttcggagcgggagtgttcgttgtgccagcgactaaaaagagaattaaatatgggtgatgttgagaaaggcaagaagatttttattatgaagtgttcccagtgccacaccgttgaaaagggaggcaagcacaagactgggccaaatctccatggtctctttgggcgggagacaggtcaggcccctggatactcttacacagccgccaataagaacaaaggcatcatctggggagaggatacactgatggagtatttggagaatcccaagaagtacatccctggaacaaaaatgatctttgtcggcattaagaagaaggaagaaagggcagacttaatagcttatctcaaaaaagctactaatgagtaataattgg

SEQ ID NO: 871 - DNA, 385 bp, Homo sapien
  misc_feature (1)...(385): n = A,T,C or G
ttttttttttttnnntttttttttttnaaagattcactttatttattcattctcctccaacattagcataattaaagccaaggaggaggagggggggtgaggtgaaanatganctggaggaccgcaataggggtaggtcccctgtggaaaaagggtcanaggccaaaggatgggagggggtcaggctggaactgaggancaggtgggggcacttntccctntaacactntcccctgttgaagctntttgtgacgggcnanctcaggccctgatgggngacttcncaggcgtanactttgtgtttctcgnantctgctttgctcancgtcagggtgctgntgaggctgtanggtgctgtccttgctgtcctgctntgngacactct

SEQ ID NO: 872 - DNA, 184 bp, Homo sapien
  misc_feature (1)...(184): n = A,T,C or G
cttccttcggtctttantatttttgattgttatgtaaaactcgcttttattttaatattgatgtcagtatttcaactgctgtaaaattataaacttttatacttgggtaagtcccccaggggcgagttcctcgctctgggatgcaggcatgcttctcaccgtgcagagctgcacttggcctcag

SEQ ID NO: 873 - DNA, 397 bp, Homo sapien
ctgtgggctctgaatggcgtccctttggctatccacgccgccggcgaccactgaattctgtggttctacaacagggtctggctgaccgaattgtcagagacgtccaggaattcatcgataaccccaagtggtacactgacagaggcattccttacagacgtggctacctgctttatgggccccctggttgcggaaagagcagttttatcacagccctggctggggaactggagcacagcatctgcctgctgagcctcacggactccagcctctctgatgaccgactcaaccacctgctgagcgtggccccgcagcagagcctggtactcctggaggatgtggatgctgcttttctcagtcgagacttggctgtggagaacccagtaaagtaccaagg

SEQ ID NO: 874 - DNA, 156 bp, Homo sapien
ccagaagaacactatgccatggttgcactgaattttgtgcctactctagggcaaacagaattacaatcgaaggagttcctatctatctgtaaagaagagaacatgaaattctgttggcagaagcagcattttgaagaaataaaaggttcactgcag

SEQ ID NO: 875 - DNA, 512 bp, Homo sapien
  misc_feature (1)...(512): n = A,T,C or G
ccagcatagcgaaaacttgtctctactaaaaatacaaaaattagtcaggcatggtggtgcacgtctgtaataccagcttctcaggaggctgaggcacgaggatcacttgaacccaggaggaggaggttgcagtgagctgagatcatgccagggcaacagaatgagactttgtttaaaaaaaaaaaaagtgacttgatttaagggaaaaaatgactggctatattcagtcagatatggcaaagagtctcaaggtgttaatgtgaatgattaaggtcttggggggggtgtcccctatcagactacaggtgtttagaggcacagaaaaaggtgcagttgggttcttaatgtgaaatgatgagaagcacaactccagtgtgtctctttgtgtagaatgtcagcagacaccccctgctagatgtgctggatcatgggaaagcatttccatttgttaatagattgttcagaagttttaatttatgatgggtgtggtggctcatgcctgtngtcccagc

SEQ ID NO: 876 - DNA, 199 bp, Homo sapien
cctgtgccgggccccagggctggcagccaccagctcctcttccaggcatgggggacaccctgacaggatccggaagtctccatttacccaaaaatgcaagagccatgatcagtcatggcgacactgcaggcggtactgagtgaccatgtccagtccggctccgtccctcccacacgggggacaagcttctccgaggagg

SEQ ID NO: 877 - DNA, 486 bp, Homo sapien
cgcgtgtgctgctcccttctgccaggagcccactgcttttgcacacaagctgcattttgcgcattgactcaggtcccagttgctcttcatatctccgtgaatgattggagtgcaaagatactgttctgagcgcttcccgttttctgaaagccatgtctctcaggcatgcctcgcttagttggcgatggggttggttgactgttttcgcttttttcttcttctcttttcttcttcttcttctttttttttcttttccttttctccccctcccaacgccactgacaagaaagcactaaagatgcaggttgtgcgatcaccctataacataaggaaaagaacaggagaggttaatttgaacgtgtaggctagtggtagagggagatggaggtctggggaaagagtctgtcaggtagacatctcttttaacatgtcccagtattcggttcaccagtatctctgcacctcactactacccttcactccttg

SEQ ID NO: 878 - DNA, 363 bp, Homo sapien
cctgggcccgctgacttcagggtgaggccacagctactgcagcgctttttatttatttatttactgagatggagtcttgctctgtcacccaggctggagtgcagtggtgcaatctcggctcactgcaacctctgcctcctgggctgcagtgattctcctgcgttcaagtaattctcctgcctcggccttctgagtagttgggattacaggcatatgccaccacacttggctaatttttgtatttttagtagaaatggggtttcaccatgttggcgaggctggtctcgaactcctgacctcaaggatcctcctgcctcggcctcctaaggtgctgggattgcaggtgtgagccaccacgtctgg

SEQ ID NO: 879 - DNA, 365 bp, Homo sapien
  misc_feature (1)...(365): n = A,T,C or G
gcccatgccagcgtgtggtcagcacgcacaacttgtggctgctgtccttcctgaggaggtggaatgggagcacagccatcacagacgataccctgggtggcactctcaccattacgctgcggaatctacaaccccatgatgcgggtctctaccagtgccagagcctccatggcagtgaggctgacaccctcaggaaggtcctggtggaggtgctggcagaccccctggatcaccggaatgctggagatctctggttccccggggagtctgagagcttcgaggatgcccatatggagcacagcatctccaggagcctcttggaaggagaaatccccttcccacccacttccatccttntcctcctg

SEQ ID NO: 880 - DNA, 431 bp, Homo sapien
ccatctcccctcaccccaacctggataaaatgttacactacccactaatataaccactgacacacaaaccaagctccttccagtttaacattgaacatcaatctacatttccagtgaatgagctaaacttatgagcaggccattcaacttttcatgatacatttagtgctcagaaatggttgattccattagcctgccctatagctcaggtggcccaagatggagcctatcatcttccttggggtgtttggtgtttccaagtaggagcataaaaaggataccgtcccctaccccaccaccccatcccacataccctcactggcatccaggagaccagcagcaggctcaagaccccaaatgttgggcaccacaaataatgtgatatgtgccaggagcacggggggtaggggtgaaagagaaaaacaataagg

SEQ ID NO: 881 - DNA, 335 bp, Homo sapien
ccacagaggtggtattacaaaatatacaaagtggtttctttctttacatttcatagaagaagcctgcctcatttccaaatgagagcactagaagcacaaatcatgcagaccatttactatataacttatgaaaaatgctgtacagggctgtgactatagatatagagtatttggctctgtttgggaattgatatctacaagggggagggtcaggggaggactgtctgatatcctgacttgctgggatggtggagaagctgggatgggggaggccccaatcttgctgcacggctacacccactcctcctttcctagataaggctggagcgcactgg

SEQ ID NO: 882 - DNA, 353 bp, Homo sapien
atgcactcaaagattggattttacagctacttgcaattcaaaattcagaagaataaaaaatgggaacatacagaactctaaaagatagacatcagaaattgttaagttaagctttttcaaaaaatcagcaattccccagcgtagtcaagggtggacactgcacgctctggcatgatgggatggcgaccgggcaagctttcttcctcgagatgctctgctgcttgagagctattgctttgttaagatataaaaaggggtttctttttgtctttctgtaaggtggacttccagcttttgattgaaagtcctagggtgattctatttctgctgtgatttatctgctgaaagctcag

SEQ ID NO: 883 - DNA, 193 bp, Homo sapien
ctggcagagaagaatggctacgtgactgtcagtgagatcaaagccagtcttaaatgggagaccgagcgagcgcggcaagtgccggaacacctgctgaaggaagggttggcgtggctggacttacaggccccaggggaggcccactactggctgccagctctcctcactgacctctactcccaggagattacag

SEQ ID NO: 884 - DNA, 461 bp, Homo sapien
ctgaagaaccccatcagcgggctgttagaatatgcccagttcgctagtcaaacctgtgagttcaacatgatagagcagagtggaccaccccatgaacctcggtaagagaccacccaggaactgtacctagggttggggtcaggtgcttttgctcctgacgcagtcttggctgatttgtgagcagtgctgtttggtggcgcctatcttttcctccttcccttctgccttttagctaaattccccttgattggccctttctccagatattgagcagggaatatagaccttggaccagccagaatcttggctgaacaagggggaggttgactctgttggctgtaatgaagcttctttagaaatgattggttttggccgtacgcggtggctcatgcctgtaatcccagcactttttgaggccgaggcaggcatatcacgaggtcaggagtttgagaccagcctgg

SEQ ID NO: 885 - DNA, 266 bp, Homo sapien
  misc_feature (1)...(266): n = A,T,C or G
ctgcaatgcttcancacacttcagcaccgaggctgggcatgaggggtccgtcaccaccacatcaaatacccctaaagcaatatctttgttatgggcacttgaatggtgctgcttcacagaggctgcaccaccagtcatgaggatctcagaccagagctccaggaagttctgctgttggtctgataccaagagtaccttcagattctggaaaggattttcacggggttgccagtccagaattctttgctcctcaaggctgtacccag

SEQ ID NO: 886 - DNA, 402 bp, Homo sapien
cgcgtggtttccgattgtttgatagtatttactggagagatcatagaaacgactgtgaaccgatgtcacaccaggaaggttgttgagcatttcttcaacatcttcaattgtttcctttgtaacctgtaggtccccgatgtttaattttagagctccaattgctgttttacacaggatcactgcctcatcattacttttcaccttctcacgagtcttttccagaaaagtaagagccacattaggatcagtcatctgtctaactacatgaagaatgatttccacgagggacaaagggttcaccctgtgttcaaattcactgataaagttttcataaagcttaatgagaccatctccttgggcaaagcacggatcctgcacaaaatcaagcacctgaagtgtcag

SEQ ID NO: 887 - DNA, 342 bp, Homo sapien
ccaaagcgagagcattggcagtgaattgcagacactcttccttggtcatgccttcccggtaggtagcatcaacatagccatagatgtaggagctcccggagcctccaatggcaaaggactgccttaccatcataccccccataggcactgagtacacctgccctccttcttgagggtcccagcctgcgatgatgattcccgccatcaggtcttcccggtatcggtaacacatctccttaaagaggctggctgctgtgtggaccagtggaggctcattcagttcaatgctgtggaaaccgagctggtaggtgacagcatcagctactgcctgggtatcagcag

SEQ ID NO: 888 - DNA, 228 bp, Homo sapien
cgcgtcggccaaggctgctgctgttgctcctccaaagaaggttggcttcaaggccgtgtccagggacccacgagcagaggcactggggggcaagggatctccaagggggcaagggatccctaaagggggtagctcacaggtgagggggtttagggcccctctagggagcgcctgaggccatacattcaagagtgtccctggtgaggcccagggaagagccaggactgg

SEQ ID NO: 889 - DNA, 378 bp, Homo sapien
ttggcttttctccccttctcatcctcctctcccctttcctcactgaaggctgtgagttgctttcaatgtgacaacactatgatgtcatttggaaggatttgccaggacagactgattctgagtcctgggtgccgtatgtgtatgcggcagtgttgtcaggcgatcttgtttgaagctctatgttgccataattaccatcaagtacacactgttggcaaaaggctaacacctgactttaggaaatgctgatttgagaacaaaaggaaaggtcttttttcactgcttaaagtggggtcactttgatacctttgcggtcatgtctgtgtctgatgagtgtagaatctctggatgtgcactgtcagtcatgtgtccaccagg

SEQ ID NO: 890 - DNA, 215 bp, Homo sapien
ccattttggagtgtgtccattgggtagcaatgtggaaaccaccagggcctttgtggagaaaatggagggggttgagggagtcccaggaggggcttatttgagggcctttgccacttgctcataggcgagctcgatctcctcatcatctggacaggtggaagcgaattcttcccgggcgtaggcattgctcaagtaccgatgcactccccggaagg

SEQ ID NO: 891 - DNA, 412 bp, Homo sapien
ctggtcaagttcaacagagccttggctgaccattctatggctcaggcacctcggctcattgatggcattgttcttaccaaatttgataccattgatgacaaggtgggagctgctatttctatgacgtacatcacaagcaaacccatcgtctttgtgggcaccggccagacctactgtgacctacgcagcctcaatgccaaggctgtggtggctgccctcatgaaggcttaacgtggctcttgcccaataccaaatcgccgctttccccacaagcccttcttcctgtatcaagaatgtgctttagagtatgtgagcaacctgtcttcagtgtagtacaaaggcagagtgagggggcttgtggctccttccaaccccactccccgttcagcacagccgccatctgcaaggaagg

SEQ ID NO: 892 - DNA, 472 bp, Homo sapien
  misc_feature (1)...(472): n = A,T,C or G
ttttttttttttttttttttttaattactaccttttattctaatgtgaaccatggccctgaaagctgataacaagcttggctgancagagggaactaggggtcggcagaaaggattatgggtggaaaacattggctcttccttggggagtgatgctggggaaagggaananagtggctcancctgcaggtaaataggctanaaaagccaaggccaaaggctggaggggagaggacagtcagcatgtccagcctggggtctgggtgtagggttatcccttctccctgtgccttcccatctcgtccatgagcctaggtcttggagccttgtgttggaggctgctgtgatgtcaggaacggggatctgtctagcttttggccacttcctgggacctcacgcccctgttgacagatggagattgggcagcagggccttgctgcgttgttatctgctgttccgacttggtttgtctt

SEQ ID NO: 893 - DNA, 477 bp, Homo sapien
  misc_feature (1)...(477): n = A,T,C or G
caaagattcactttatttattcattctcctccaacattagcataattaaagccaaggaggaggaggggggtgaggtgaaagatgagctggaggaccgcaataggggtaggtcccctgtggaaaaagggtcagaggccaaaggatgggagggggtcaggctggaactgaggagcaggtgggggcacttctccctctaacactctcccctgttgaagctctttgtgacgggcgagctcaggccctgatgggtgacttcgcaggcgtagactttgtgtttctcgtagtctgctttgctcagcgtcagggtgctgctgaggctgtaggtgctgtccttgctgtcctgctctgtgacactctcctgggagttacccgattggagggcgttatccaccttccactgtactttggcctctctgggatagaagttattcagcangcacacaacanangcagtttccagatttcaactgctcatca

SEQ ID NO: 894 - DNA, 289 bp, Homo sapien
ctgtcttatggctatgatgagaaatcaaccggaggaatttccgtgcctggccccatgggtccctctggtcctcgtggtctccctggcccccctggtgcacctggtccccaaggcttccaaggtccccctggtgagcctggcgagcctggagcttcaggtcccatgggtccccgaggtcccccaggtccccctggaaagaatggagatgatggggaagctggaaaacctggtcgtcctggtgagcgtgggcctcctgggcctcagagtgctcgaggattgcccggaacag

SEQ ID NO: 895 - DNA, 179 bp, Homo sapien
  misc_feature (1)...(179): n = A,T,C or G
ctggatgggtccanacaaagtggaatccctggaacctttaactgagcagtgaaggtcagtgcctcagagcctgagagatgaacaggaccagagagagaggtgggcaggcaggcacaaggttatgtcttcctcagactcggaaccctgctcttctccaccatccagacgttcagctacag

SEQ ID NO: 896 - DNA, 557 bp, Homo sapien
  misc_feature (1)...(557): n = A,T,C or G
ccactcactgctgggacccaggcacctcccttctccatcctctctggattgtcagtaatgtcctggaacagaagcctgtgggatggccttgggcacggagaagccctggggtcagtgtcgtgcacggatggcggcagtgttgaacccaggaggctgaacccggcccaccacggaagatgagtgcatggcaaccgcctgccttcacgtcgctccacttggtaaccccaaggtctgggctgttctaggtattgcttcacgtgccccagcaagcccttaacaagagggcctggttccctgaagaaccaatcccaggaaggggccttgatccctccgccttgctgagagtgaaccctcgtctctcctcacnctccatttcatttctgggaattggggcttagtttcgaacctttggcaaggctgttcttactaatgcccaagcccctttacccctctccctataggttacacaggggagaccagggcctcggcagaagactgctgccacacttccgaatcattctgcttgccaaataggtcatcttcaccagttgactgac

SEQ ID NO: 897 - DNA, 495 bp, Homo sapien
ctggaatctcctttgcaatcccatctgataagattaaaaagttcctcacggagtcccatgaccgacaggccaaaggaagagccatcaccaagaagaagtatattggtatccgaatgatgtcactcacgtccagcaaagccaaagagctgaaggaccggcaccgggacttcccagacgtgatctcaggagcgtatataattgaagtaattcctgataccccagcagaagctggtggtctcaaggaaaacgacgtcataatcagcatcaatggacagtccgtggtctccgccaatgatgtcagcgacgtcattaaaagggaaagcaccctgaacatggtggtccgcaggggtaatgaagatatcatgatcacagtgattcccgaagaaattgacccataggcagaggcatgagctggacttcatgtttccctcaaagactctcccgtggatgacggatgaggactctgggctgctggaataggacactcaagacttt

SEQ ID NO: 898 - DNA, 406 bp, Homo sapien
ccacgactgcatgcccgcgcccgccaggtgatacctccgccggtgacccaggggctctgcgacacagggagtctgcatgtctaagtgctagacatgctcagctttgtggatacgcggactttgttgctgcttgcagtaaccttatgcctagcaacatgccaatctttacaagaggaaaccgtaagaaagggcccagccggagatagaggaccacgtggagaaaggggtccaccaggccccccaggcagagatggtgaagatggtcccacaggccctcctggtccacctggtcctcctggcccccctggtctcggtgggaactttgctgctcagtatgacggaaaaggagttggacttggccccggaccaatgggcttaatgggacctagaggcccacctggtgcag

SEQ ID NO: 899 - DNA, 277 bp, Homo sapien
cctaagagtcattaaaaaattctccctttgtaacctcagtgctggggactgaggcgagccccctcaggtcgctggagtgcaccagtcttggggaagaggtgcaggagaagctgtgttttttatctccacacgcagtatgaagataaaattacatagtattacctagacatagacagtattacctaggtagatgcactgctcacctgcacccttcccagctctcatttttgttaggtgatttgggatagggatagtgttttggggtatggggggagtg

SEQ ID NO: 900 - DNA, 389 bp, Homo sapien
ctgttttgaaatatttactgttattaaaacttgcttcaagggaaattgtgaatatatttccatatacaagcactagtaacagtaagtggccctgtcatccactaactcaggcaaagtaaagaatggcatttttgaaggacattttacctccccatatgatttgattggctaggactttcttctgtaaagtcataccttttcacatcttaagtttttacatttgccattttccaaatctcaattttgggcaagaacgatatagtcacaactatggggctgctttcaaaagcggggctccatttctactgtcagatcaatgtggtgctgtaaccatctttttatccctaccttcaagaacctccttatatgaagcctgtctttatccatca

SEQ ID NO: 901 - DNA, 453 bp, Homo sapien
ctggagacacccacttgggtggagaagattttgacaaccgaatggtcaaccattttattgctgagtttaagcgcaagcataagaaggacatcagtgagaacaagagagctgtaagacgcctccgtactgcttgtgaacgtgctaagcgtaccctctcttccagcacccaggccagtattgagatcgattctctctatgaaggaatcgacttctatacctccattacccgtgcccgatttgaagaactgaatgctgacctgttccgtggcaccctggacccagtagagaaagcccttcgagatgccaaactagacaagtcacagattcatgatattgtcctggttggtggttctactcgtatccccaagattcagaagcttctccaagacttcttcaatggaaaagaactgaataagagcatcaaccctgatgaagctgttgcttatggtgcag

SEQ ID NO: 902 - DNA, 293 bp, Homo sapien
cctccggccgcccccacggctcccatggcctcttcctgcgctaccgtgtggaggccctaaccctgcgtggcatcaatagcttccgccagtacaagtatgacctggtggcagtgggcaaggctttggagggcatgttccgcaagctcaaccacctcctggagcgcctgcaccagtccttcttcctctacttgctccccggcctctcccgcttcgtctccattggcctctacatgcccgctgtcggcttcttgctcctggtccttggtctcaaggctctggaactgtggatgcag

SEQ ID NO: 903 - DNA, 228 bp, Homo sapien
ctggagactctgggccaggagaagctgaagctggaggcggagcttggcaacatgcaggggctggtggaggacttcaagaacaagtatgaggatgagatcaataagcgtacagagatggagaacgaatttgtcctcatcaagaaggatgtggatgaagcttacatgaacaaggtagagctggagtctcgcctggaagggctgaccgacgagatcaacttcctcaggcag

SEQ ID NO: 904 - DNA, 388 bp, Homo sapien
ccaagcgctcagatcggcaaggggcaccagtcttgatctgcccagtgcacagccccacaaccaggtcagcgatgaaggtatcttcagtctcccccgaacgatgaggcaccatgacgccccaaccattggcctgggccagcttgcacgcctgaagagactcggtcacggagccaatctggttgactttgagcaggaggcagttgcaggacttctcgttcacggccttggcgatcctctttgggttggtcactgtgagatcatcccccactacctggattcctgcactggctgtgaacttctgccaagctccccagtcatcctggtcaaagggatcttcgatagacaccactgggtagtccttgatgaaggacttgtacaggtcagccag

SEQ ID NO: 905 - DNA, 272 bp, Homo sapien
  misc_feature (1)...(272): n = A,T,C or G
ccggagcccacggnggtcatggctgccagagcgctctgcatgctggggctggtcctggccttgctgtcctccagctctgctgaggagtacgtgggcctgtctgcaaaccagtgtgccgtgccagccaaggacagggtggactgcggctacccccatgtcacccccaaggagtgcaacaaccggggctgctgctttgactccaggatccctggagtgccttggtgtttcaagcccctgcaggaagcagaatgcaccttctgaggcacctccag

SEQ ID NO: 906 - DNA, 525 bp, Homo sapien
ctgtgcacccgagtgtcctttcccccctaagctggcacataggagcaaaagttcactaaccctgcagtggaaggcaccaattgacaacggttcaaaaatcaccaactaccttttagagtgggatgagggaaaagaaatagtggtttcagacagtgcttcttcgggagccagaagcactgcaagttgacaaagctttgtccggcaatggggtacacattcaggctggccgctcgaaacgacattggtaccagtggttatagccaagaggtggtgtgctacacattaggaaatatccctcagatgccttctgcaccaaggctggttcgagctggcatcacatgggtcacgttgcagtggagtaagccagaaggctgttcacccgaggaagtgatcacctacaccttggaaattcaggaggatgaaaatgataaccttttccacccaaaatacactggagaggatttaacctgtactgtgaaaaatctcaaaagaagcacacagtataaattcaggctgactgcttct

SEQ ID NO: 907 - DNA, 365 bp, Homo sapien
gtaaattttaagtctttcagttttatagatacggaaaacaagggtgactctttaccacaggatgaataaagaactaagtaatatgggaaatgcagcaatttctggactagctgagccgattccttcctgtgagcacactgtaagctttcaagttctctgggcaggaattacagcacctgtcccctgcaatggccctgctgtgtgatgctcatcgcttcccttcgtgctggagcagtcccccaggtgtccatctcctatctttttgttccaatcttctgtgagttccagctagcaggctttacatctggggaaaggaaaaccaggggttttagctctgttctctgctcccatccttcgctcaccag

SEQ ID NO: 908 - DNA, 608 bp, Homo sapien
  misc_feature (1)...(608): n = A,T,C or G
cggaggtgcctcagccatggcatggatccctctcttcctcggcgtccttgcttactgcacaggacgtgcggcctcctttgaggtgacccagccaccttcaatgtccgtgtccccaggacagacagccaagatcacctgcactggagataggttgggggatgaatatgtttgctggtatcaacagaagccaggccagtcccctgtattgataatatatttggataacaagcggccctcggggatccctgaccgattctctgcctacgcctctgggaacacagccactctgatcatcagcggggcccaagttatggatgaggcttattattactgtcaggcgtgggacggcagaactgtggtgttcggcgaagggaccaacctgaccgtcctaggtcagcccaaggctgccccctcggtcactctgttcccgccctcctctgaggagcttcaagccaacaaggccacactggtgtgtctcataagtgacttctacccgggagccgtgacagtggcctggaaggcagatagcagccccgtcaaggcgggagtggagaccaccacaccctccaaacaaagcaacaacaagtacgcggncagcagctatctga

SEQ ID NO: 909 - DNA, 513 bp, Homo sapien
ctggtctcaaactcctcacctcaactgatccgcccaccttggcctcccaaagtgctgggattataggtgtgagccaccgtgcccaaagttaagtatttttgatcaagtgttttgtcttttgtgcaaggcatttgtggctctgtcatagcagaggaaaacaaaacatgcctatcaaatgaatcaagtccgacctcttctcatattgagcaactagaggtctaggaacatttcccctacctgtcattctcatctggcataccaggtgtacatactccttcttattctcctctgttaccaagatgttggccccattgggtttgaggtcacgaactccacaaactccaaactcttggacctcagtgctgaaggtgaggtcatagcctagtgtggagacatcattttccagcagataaaccagaccttggtagaagtggtaatcttcactctccatatctgtatatctgactgacttgcccaagatgtgtttgtaaaaggatcgagtaaagtagcact

SEQ ID NO: 910 - DNA, 272 bp, Homo sapien
ccggagcccacggtggtcatggctgccagagcgctctgtatgctggggctggtcctggccttgctgtcctccagctctgctgaggagtacgtgggcctgtctgcaaaccagtgtgccgtgccagccaaggacagggtggactgcggctacccccatgtcacccccaaggagtgcaacaaccggggctgctgctttgactccaggatccctggagtgccttggtgtttcaagcccctgcaggaagcagaatgcaccttctgaggcacctccag

SEQ ID NO: 911 - DNA, 263 bp, Homo sapien
cctgcaggtacaaattgaccaggctgttgacggctgcctccacgtcggtggaataattctgacgaatctgggagctcatggttggttggcaagaaggagctaaccacaaaaacggtgctggcaggtcccagaagcaggagatggccgagaagatggtcccggaggttgcaagcggagaggaaatcggagggcggtcggaggctggaagagagtccccggatctgttccgtccaaacactgttgaagcaagagacagacccgcg

SEQ ID NO: 912 - DNA, 470 bp, Homo sapien
ctgtgagcaccagcccaaccctacctctttaaaaagaaaaaacacaagtccactctgaagtcagcctctgtaacctccccacaagaaaaccgttttacatcagtcactaaccaaacaaccaacagtgcttcaacacagaaagtaaagcattatccagggcttggactgtctttcaagaaagccccaaatcccctggcaggaggaagtcacagcagtgaagccccatcccaggcccagttgttcccacgaaacacaccacgtggagacccagcatgactgccgactgattccaagtccccaggagggctttattttttcttttcaacatcctgttctgcggcttccttggcactttttgcccgtatgccgaagagccgggcgttggcacgggccatacggagactagcgaaggctttgaaattcttctcttcctcagtgatgactcgagctttctccttcttatagacgtt

SEQ ID NO: 913 - DNA, 426 bp, Homo sapien
cctggacaccataaggctggtgggctttcagaattgtgttaggggggcaggagtggcaggttcctgaatctcggtcaatatagtaaccagcaggacaagaggtgcaggaggagcccacatcagaggcttctagggcacagggacggcagtaggaggccacgccattcataacattggtgacattgatggagtagatcttggcaacgtcattggtgtacttcctgcttgcctcatgaaaagtggtcctctggaaggcccaggtgaggctcgtggtagtgttctcctcaatgatgtaggtataggactgtttgcctttggaacctttccacgtctccacaggagtgttggtcctagaattcacacccaccatgaagtagagctcacagttcacagaacagagggtctcaaagacaaatgtgattctgg

SEQ ID NO: 914 - DNA, 252 bp, Homo sapien
ccaagctgggggtgcgcacatgtggaagaactggaggcccggtgtcatgagcagaggctgtaccctagatgcccgccccagtgccagccaacccaagacaggagaaagagtttggcagtttcgcctctgaggaatacatgcctggccctcctgtgaggtgaggcggtaggggggaaggcgcaggctccgaagtctgagggcttgccggagggggagtttctgagccttttgcatgggtgcatgccccctgcc

SEQ ID NO: 915 - DNA, 234 bp, Homo sapien
ccactgggactttggcttcctgatgccgattgtggatttctgctgcaaagacagtgatgttgagccaggctgtttcctctctatccagaggttttgtagttttaataaaaccatcctctggattaatagtgaaaaatctgtcgaggtcagtgtgacgatcgatggaataccttatcgggctgttggcagcatcagggtctttggcatgcactctcccaaccacggtgccagcag

SEQ ID NO: 916 - DNA, 366 bp, Homo sapien
  misc_feature (1)...(366): n = A,T,C or G
ccattcagtctcanttcagaaaattccagaagaagaaggctgggtctcagtcctagtgggagaaccccctcctagtccacctgaaaacaccaaattcaaccatcatctgtcaagaaattaaaagaacaacaccctagagagaagtcatccacacacaatccacacacgcatagcaaacctccaatgcatgtacagaaacctgtgatatttatacccttgtaggaaggtatagacaatggaattgtgagtagcttaatctctatgtttctctccattttcattcctcctgcaactattttccttgatgttgtaataaaatgaagttacgatgagtgatnaaaaaaaaaaaaaaaaaaaaaaaaaaaa

SEQ ID NO: 917 - DNA, 492 bp, Homo sapien
ggcacagcgagggcagcatctggaggagctctgcagcctccacacctaccacgacctcccagggctgagctcaggaaaaaccagccactgctttacaggacagggggttgaagctgagccccgcctcacacccacccccatgcactcaaagattggattttacagctacttgcaattcaaaattcagaagaataaaaaatgggaacatacagaactctaaaagatagacatcagaaattgttaagttaagctttttcaaaaaatcagcaattccccagcgtagtcaagggtggacactgcacgctctggcatgatgggatggcgaccgggcaagctttcttcctcgagatgctctgctgcttgagagctattgctttgttaagatataaaaaggggtttctttttgtctttctgtaaggtggtcttccagcttttgattgaaagtcctagggtgattctatttctgctgtgatttatctgctgaaagctcag

SEQ ID NO: 918 - DNA, 557 bp, Homo sapien
  misc_feature (1)...(557): n = A,T,C or G
ctgctcctgggtaggcgtgcgggccatatcgtaggggtaggatactagccgctcgccgccgttcagatttgctcccagcacgaaggggttcttctccatccaggcaatgatggcccggacctccgtggataccgtggcatctggcgaaaggtagcgttcagggatgggcaagttattgttggggacccggtaggggacccatttcctctcctcagctccccagagcacagagttgagatccgggaaatcttcaaagatgtcaaagccctcctcagtccacagtcccagcgcccagttcccaaactctgagcccatctgcgctgccacctcgtagccatcagggttcagtgagggcaccaggtggatgcgtgtgtcctgcaccaggctgcgcacacgtgggttcccatcgcggtactctcggcacaggtactgcatgagcagcagcaacagctctcggcccagcacctcgttgccatggatcccagcagtgtagcggaactcgggctcccccagttcatgctccccanggttgtctgagatctccatggcatagatct

SEQ ID NO: 919 - DNA, 407 bp, Homo sapien
ccttatgactacaacggcccacgagaaaaatatggaatcgttgattacatgatcgagcagtccgggcctccctccaaggagattctgaccctgaagcaggtccaggagttcctgaaggatggagacgatgtcatcatcatcggggtctttaagggggagagtgacccagcctaccagcaataccaggatgccgctaacaacctgagagaagattacaaatttcaccacactttcatcacagaaatagcaaagttcttgaaagtctcccaggggcagttggttgtaatgcagcctgagagattccagtctaagtatgagccccggagccacatgatggacgtccagggctccacccaggactcggccatcaaggacttcgtgctgaagtacgccctgcccctggttgg

SEQ ID NO: 920 - DNA, 340 bp, Homo sapien
  misc_feature (1)...(340): n = A,T,C or G
cctcttgggcagcnnagggccctgcctctgtttcatgatgcatgggtcatttgtcttgggtgtcctatcccatatggagaagaaaggggctctaagttctggctcttctttctttggggttctctgtacctgaggaaaccaggccctgggtgactttgcagatctgctcaccctcggtgagcaacagtgtcagccatgcaagcaggacagaatggtgactgggtgcccttggtgagctgtgtatttcctaggaggtagaaaactgtgggaaactgtggctaataaaaactaagtgtgagcgtcnaaaaaaaaaaaaannaaaaanaaaaaaagcttgtac

SEQ ID NO: 921 - DNA, 571 bp, Homo sapien
ggaaaaataattttattcctcaaatgatcagcacattcagaagcaggacagaggagctctgatgacatctctgggggactcaaagcggccctcattttctggtattttcccaggtgattctcttccaacctgtgagtcctgctctctttcctcccatctgaagtttgagacatcctctgccacaaggaaagccaccaataccagcccaaagagccaccagagaggaaccaaaccacatgcatcaagttataggaaggatgcaagaagggaaattaggaaggaaagggaggagtttagttggcattctggggcatgctaacatgagggcgatggtctctctccaagtcgctggacatatcccttttctttccaggtgctccaactccaattgcagtttgggggaacgtgtgaaacttgttgaagtcctgcgtgtatgtgcccagcatgcaagtactcagattaccgcaccgcttagatctggggctgtccaggctggagccctctctctcttgctcctgctccagctcactggccttcatctgcacatagtcctgcaccagtgcagccagca

SEQ ID NO: 922 - DNA, 262 bp, Homo sapien
  misc_feature (1)...(262): n = A,T,C or G
gcccaanacatncaggtcacagcagattcgggcacgtgtggaagaaggttggatgatgtcatccacaaaccctcgcactgctgcagggaaagggttggcaaacttctcgatgtactctgcctgancagcttccacattctcatgccctttgaagatgatctccacagcgccctttgctcccatgactgcaatctctgnggtgggccangcatanttggtatcaccacaaangtgcttagagctcatgacatcntaggcacct

SEQ ID NO: 923 - DNA, 234 bp, Homo sapien; identical to SEQ ID NO: 915

SEQ ID NO: 924 - DNA, 152 bp, Homo sapien
ccaggattgacaggccatccattcacagccaggagatgctgggccagttcctccaagaggtctccgtcatggcagtgatgaaaacctaacagggtggccccctgtgccagctcaggtgactggagcccgagggcctgacaggttcccagcag

SEQ ID NO: 925 - DNA, 400 bp, Homo sapien
caatatcatgccaaggacccaaacaacctcttcatggtgcgcttggcacagggcctgacacatttagggaagggcacccttaccctctgcccctaccacagcgaccggcagcttatgagccaggtggccgtggctggactgctcactgtgcttgtctctttcctggatgttcgaaacattattctaggcaaatcacactatgtattgtatgggctggtggctgccatgcagccccgaatgctggttacgtttgatgaggagctgcggccattgccagtgtctgtccgtgtgggccaggcagtggatgtggtgggccaggctggcaagccgaagactatcacagggttccagacgcatacaaccccagtgttgttggcccacggggaacgggcagaattgg

SEQ ID NO: 926 - DNA, 521 bp, Homo sapien
ccacgtccctattttagaaatgagaggagtgactgcacacaggaaaaatgccacttttagcaattcaaagtggaaaaacttcttttatataaaaattatcccaactcccaccccttggctctcagtgttgcatctcccacagaggtaaagttgtgccattttcccacggctttaaacaaagcaaaacaaaaccaccaatcctaataacccccctccctgccccgtctccacgctgtgcggagagggctctagcccctcagtcggacttctccttctccttcatgtgcaagaagacgatgctgaagatgaagagccccagcatcatggagaaggcgctggcgtagtaggggtaggccgaggggatgaagcgctcatactgcgtgtgctggagtggccgcacggatacctgagtggaagagtacaggtgtgtgtagcctagccggttgtaatccactttaaactggaatacaccatacacgtcgggcaacttgaactgaacactgtatttgccacctttcttc

SEQ ID NO: 927 - DNA, 520 bp, Homo sapien
ccaggctagtctcgaactcctgacctcaggtgatctgcctgcctcggcctcccaaagtgctgggattaccggcgtgagccaccatgcctggccttacattttttaaaatgagggaacaaatgaataaatgaccaccatgttaggggctggctctgaacagaattgtaaagtgggccaagcttgctctcaaggtcaccttaagcccacggttgctgtgtcctgccctctcagggtcatttcccagcctccaggcacctgttcacagaggctgcatctggcctcgcctccacccctccatcctaaggtgctccgctgacttagaacaggacagtcagggagagaatgtgtctcaggagggtggagtcagatgatcacggccttcctggcatctgaggggatacagcttcgggtagcaaagtgtgattttccctgagccccaggaaagcttggccttggtcagaatacattgaaccctgagggccagagagtccctggggcaagctctgagagggaggacctc

SEQ ID NO: 928 - DNA, 492 bp, Homo sapien
ctgagctttcagcagataaatcacagcagaaatagaatcaccctaggactttcaatcaaaagctggaagtccaccttacagaaagacaaaaagaaacccctttttatatcttaacaaagcaatagctctcaagcagcagagcatctcgaggaagaaagcttgcccggtcgccatcccatcatgccagagcgtgcagtgtccacccttgactacgctggggaattgctgattttttgaaaaagcttaacttaacaatttctgatgtctatcttttagagttctgtatgttcccattttttattcttctgaattttgaattgcaagtagctgtaaaatccaatctctgagtgcatgggggtgggtgtgaggcggggctcagcttcaaccccctgtcctgtaaagcagtggctggtttttcctgagcccagccctgggaggtcgtggtaggtgtggaggctgcagagctcctccagatgctgccctcgctgtgcc

SEQ ID NO: 929 - DNA, 209 bp, Homo sapien
ttttttcaccatctaacaaaggcactttattgcattaccattcacaattaacagtcaagaacaaataataataacaaataaaataacttttaagaggacaaggcattagaaataaaaaaggacactaataacatttgtaaaagcttgtactggatgtggttgcccccatttgtgtgtgtggttgtgtgtgtgtggttgtgtgttggtgg

SEQ ID NO: 930 - DNA, 617 bp, Homo sapien
cgcgtcctttaacaagccccgttctcaaaaggctgggggtatttatataagaacttattccaaagtgactctaagatccatgttcccaagatctagtacgggctattcatggttctgaggcatgtccagcatgcaggcaaacttatctgttcaaattgaggtaaaacagacaaaaaacacttaatattaacagaagctacataattaaaactaaccttctgctgcttatttaagctaatgatgtattcttaccaaacagagaccctcaagtcaatcatttcttttgattttagttaccacccccaaattaagcctcttctttcaaagccattattagttaaaaaaaagttttaaaatgaagaaaaatattttttccagaacttgtattttgtaattagtgtgatgcaatttctttttatttttcaaacttagaaataactcatgtatggtactatttggtatttttttcagataccaaggaataccgacaggattcataaataggattttctgacactggcaggaaagtctgctaacgtttacaaaataccaaagactcttctttcaagcttcaaagatggctgagaattaacagttatgattagtttttcagtaca

SEQ ID NO: 931 - DNA, 521 bp, Homo sapien
ccaacaaaattggtgaacacatggaagaacatggcatcaagtttataagacagttcgtaccaattaaagttgaacaaattgaagcagggacaccaggccgactcagagtagtagctcagtccaccaatagtgaggaaatcattgaaggagaatataatacggtgatgctggcaataggaagagatgcttgcacaagaaaaattggcttagaaaccgtaggggtgaagataaatgaaaagactggaaaaatacctgtcacagatgaagaacagaccaatgtgccttacatctatgccattggcgatatattggaggataaggtggagctcaccccagttgcaatccaggcaggaagattgctggctcagaggctctatgcaggttccactgtcaagtgtgactatgaaaatgttccaaccactgtatttactcctttggaatatggtgcttgtggcctttctgaggagaaagctgtggagaagtttggggaagaaaatattgaggtttaccatagttacttt

SEQ ID NO: 932 - DNA, 197 bp, Homo sapien
ccttgtgaccaattacatatgattaaaattacttcccacattcacatccacagtactcgtccaccatttaacatctcaaccaaaacgttacacatgtgaaacaatcactaacaggcaaaaatactaaacctgtatatttggtattgcaaatacacttatgcatgagcaagcaagggattcacagtgagaatctacag

SEQ ID NO: 933 - DNA, 610 bp, Homo sapien
cctcattttaacaatatcttttttttgctcttctgcttccaaaccttatttgccaatgtaatgcctttatataaagttcttatgatgaatgaaaaactttcaagtgctgttgcctcattaaatgcattatttattaatttaacttctagtactctcgataaagagccagtgaaatgagttattgagttccagggaaaaaaatgagaacataattttgaatttattatctctctatacacacacagttcataattggattacatataataataatatcaacaagtctatcagtatcgaagttggatactggtaatttctcatgtgaggctcttgtgtcacagtcagcatagatttctggagcatttgtctgttgatcttttggtggcctcaaacctcattaagtggtgtgggagatgctgtttctgccatgtgagaatgtgatggcagaattaacacaaccccaccaggggtacaacagagcactttacatccaaaggcagagagggacacagcaatgcagaattccagcacacttaagaggagcaccatgccatccagacccattaagatggacatagtcccatgacaattatttgagttgccatagtag

SEQ ID NO: 934 - DNA, 384 bp, Homo sapien
ctgctaccaggggagcgagagctgactatcccagcctcggctaatgtattctacgccatggatggagcttcacacgatttcctcctgcggcagcggcgaaggtcctctactgctacacctggcgtcaccagtggcccgtctgcctcaggaactcctctgagtgagggaggagggggctcctttcccaggatcaaggccacagggaggaagattgcacgggcactgttctgaggaggaagccccgttggcttacagaagtcatggtgttcataccagatgtgggtagccatcctgaatggtggcaattatatcacattgagacagaaattcagaaagggagccagccaccctggggcagtgaagtgccactggtttaccaggcag

SEQ ID NO: 935 - DNA, 125 bp, Homo sapien
  misc_feature (1)...(125): n = A,T,C or G
nttaaaattcatggaagtaatannacagtaataaaatatggatactatgaaaactgacacacagaaaaacataaccataaaatattgttccaggatacagatattaattaagagtgacttcgtta

SEQ ID NO: 936 - DNA, 546 bp, Homo sapien
  misc_feature (1)...(546): n = A,T,C or G
gcccatgccagcgtgtggtcagcacgcacaacttgtggctgctgtccttcctgaggaggtggaatgggagcacagccatcacagacgataccctgggtggcactctcaccattacgctgcggaatctacaaccccatgatgcgggtctctaccagtgccagagcctccatggcagtgaggctgacaccctcaggaaggtcctggtggaggtgctggcaggttctcccgccaaggttctccccctgcctcgaggaggaaggggctggaggctcatggctctgcctcccatagaccccctggatcaccgggatgctggagatctctggttccccggggagtctgagagcttcgaggatgcccatgtggagcacagcatctccaggagcctcttggaaggagaaatccccttcccacccacttccatccttctcctcctggcctgcatctttctcatcaagattctagcagccagcgccctctgggctgcagcctggcatggacagaagccagggacacatncacccagtgaactggactgtggacctc

SEQ ID NO: 937 - DNA, 550 bp, Homo sapien
caccaatcaaaattcctgttggtcctgagactttgggcagaatcatgaatgtcattggagaacctattgatgaaagaggtcccatcaaaaccaaacaatttgctcccattcatgctgaggctccagagttcatggaaatgagtgttgagcaggaaattctggtgactggtatcaaggttgtcgatctgctagctccctatgccaagggtggcaaaattgggctttttggtggtgctggagttggcaagactgtactgatcatggagttaatcaacaatgtcgccaaagcccatggtggttactctgtgtttgctggtgttggtgagaggacccgtgaaggcaatgatttataccatgaaatgattgaatctggtgttatcaacttaaaagatgccacctctaaggtagcgctggtatatggtcaaatgaatgaaccacctggtgctcgtgcccgggtagctctgactgggctgactgtggctgaatacttcagagaccaagaaggtcaagatgtactgctatttattgataacatctttcgcttcaccca

SEQ ID NO: 938 - DNA, 192 bp, Homo sapien
  misc_feature (1)...(192): n = A,T,C or G
tttttttttttttttttttttttttttnggaaaaagcccaaaaggcactttattggaggtctntgcctccattcacaggaaaaaggagctgggagccccatcctaagggtcccagcatcagcccactggagggcctggaacagtccancactntgtgggaaaggagtggggaggggaatgttttaaaaaaaa

SEQ ID NO: 939 - DNA, 337 bp, Homo sapien
ccaaaatattggaacacacagaaccaaaccaggtgtgttctacacctgcatgagtgaaggatttccacgtagacacctaggaagagcccgcatgccctagactcactccagaggaaggattgatttgcaaccagaaagggagctgaaaaccacggagctccatggctcttcattcaaaagggaaaataatgattccacgttgctttttagagttcaaatcaacatctttctggataaatctattttttaacaatctttttattatttgtaaaagatataaaaacaactcccatcagtagcaatacaaggttatacattttaaccagattttctcagg

SEQ ID NO: 940 - DNA, 362 bp, Homo sapien
cctgtccaaacgtgcgcaccaggaccgaggggagctccctcccaacacctgctaggaattgccaacttttaaatggatggggttttttatgggttgaacctctgttaatacttttgtacactctcactacagtttatatttttataggctattttctcaaggtgtttctagattccacatatctattttatataacaagttattatgttatgtgtgtgactcccttgtgtgtatctgtgccagcctcagcctccgagttgcttttccctctggccctgactctcactgactcaccgatgtggtgtgcaggcccacttcttaccccagatagcctcgggcgctgcctgtagtcatgccgacag

SEQ ID NO: 941 - DNA, 216 bp, Homo sapien
ctggacatctttccagcccgggatacctaccatcctatgagcgagtaccccacctaccacacccatgggcgctatgtgccccctagcagtaccgatcgtagcccctatgagaaggtttctgcaggtaatggtggcagcagcctctcttacacaaacccagcagtggcagccacttctgccaacttgtaggggcatgtcgcccgctgagctgagtgg

SEQ ID NO: 942 - DNA, 324 bp, Homo sapien
ctgattggcttcaggccccctacctctataaactctaccagcattactacttcctggaaggtcaaattgccatcctatatgtctgtggccttgcctctacagtcctctttggcctagtggcctcctcccttgtggattggctgggtcgcaagaattcttgtgtcctcttctccctgacttactcactatgctacttaaccaaactctctcaagactactttgtgctgctagtggggcgagcacttggtgggctgtccacagccctgctcttctcagccttcgaggccagggagcctcaaatcttcagtctctcagagaccacag

SEQ ID NO: 943 - DNA, 597 bp, Homo sapien
ctgacaaaattcctgggttactaggtgtctttcagaagctgattgcatccaaagcaaatgaccaccaaggtttttatcttctaaacagtataatagagcacatgcctcctgaatcagttgaccaatataggaaacaaatcttcattctgctattccagagacttcagaattccaaaacaaccaagtttatcaagagttttttagtctttattaatttgtattgcataaaatatggggcactagcactacaagaaatatttgatggtatacaaccaaaaatgtttggaatggttttggaaaaaattattattcctgaaattcagaaggtatctggaaatgtagagaaaaagatctgtgcggttggcataaccaaattactaacagaatgtcccccaatgatggacactgagtataccaaactgtggactccattattacagtctttgattggtctttttgagttacccgaagatgataccattcctgatgaggaacattttattgacatagaagatacaccaggatatcagactgccttctcacagttggcatttgctgggaaaaaaagagcatgatcctgtaggtcaaatggtgaat

SEQ ID NO: 944 - DNA, 359 bp, Homo sapien
ctggaagaggaaaaggagatactgcagaaagaactctctcaacttcaagctgcacaggagaagcagaaaacaggtactgttatggataccaaggtcgatgaattaacaactgagatcaaagaactgaaagaaactcttgaagaaaaaaccaaggaggcagatgaatacttggataagtactgttccttgcttataagccatgaaaagttagagaaagctaaagagatgttagagacacaagtggcccatctgtgttcacagcaatctaaacaagattcccgagggtctcctttgctaggtccagttgttccaggaccatctccaatcccttctgttactgaaaagaggttatcatctgg

SEQ ID NO: 945 - DNA, 367 bp, Homo sapien
caggatctgaagtttggggtcgagcaggatgttgatatggtgtttgcgtcattcatccgcaaggcatctgatgtccatgaagttaggaaggtcctgggagagaagggaaagaacatcaagattatcagcaaaatcgggaatcatgagggggttcggaggtttgatgaaatcctggaggccagtgatgggatcatggtggctcgtggtgatctaggcattgagattcctgcagagaaggtcttccttgctcagaagatgatgattggacggtgcaaccgagctgggaagcctgtcatctgtgctactcagatgctggagagcatgatcaagaagccccgccccactcgggctgaaggcagtgatgtgg

SEQ ID NO: 946 - DNA, 335 bp, Homo sapien
ccacagaggtggtattacaaaatatacaaagtggtttctttctttacatttcatagaagaagcctgcctcatttccaaatgagagcactagaagcacaaatcatgcagaccatttactatataacttatgaaaaatgctgtacagggctgtgactatagatatagagtatttggctctgtttgggaattgatatctacaagggggagggtcaggggaggactgtccgatatcctgacttgctgggatggtggagaagctgggatgggggaggccccaatcttgctgcacggctacacccactcctcctttcctagacaaggctggagcgcactgg

SEQ ID NO: 947 - DNA, 384 bp, Homo sapien; identical to SEQ ID NO: 850

SEQ ID NO: 948 - DNA, 173 bp, Homo sapien
ctgtggaggggacactgtctttgaggcatcactggttccacaaagggtaggggaaggtcttgagggaccaccccatgccctcattaatcaaccagaagcttggcctggagcagcagcggggattccagtagctgtgggcatacaggatgctagggcggccacaacccaggcag

SEQ ID NO: 949 - DNA, 211 bp, Homo sapien
  misc_feature (1)...(211): n = A,T,C or G
ccatccacgttgnnaaacagaataaaatggaaattcaccttgtcatctacccgacattggccttcctgtgccacggcatcatgggctgcctgtatggcctcattcttttcaaagcattttgctctgtcttcaggggacattttctctgtttcagaaagaaactgtttcagaactgatccatcctcaaatcccagtttgtcttgattattgg

SEQ ID NO: 950 - DNA, 382 bp, Homo sapien
cctcatcgtgagtcaggacgtggtgaaagctgcagtggctgctgtgctctctccagaagaattcatggtcctgttggactctgtgcttcctgagagtgcccatcggctgaagtcaagcatcgggctgatcaatgaaaaggctgcagataagctgggatctacccagatcgtgaagatcctaactcaggacactcccgagttttttatagaccaaggccatgccaaggtggcccaactgatcgtgctggaagtgtttccctccagtgaagccctccgccctttgttcaccctgggcatcgaagccagctcggaagctcagttttacaccaaaggtgaccaacttatactcaacttgaataacatcagctctgatcggatccag

SEQ ID NO: 951 - DNA, 473 bp, Homo sapien
  misc_feature (1)...(473): n = A,T,C or G
cctctctgccaggcaaaggagggagctgcggctctttgacattaaaccagagcagcagagatacagccttttcctccctctccatgaactctggaaacagtacatcagggacctgtgcagtgggctcaagccagacacgcagccacagatgattcaggccaagctcttaaaggcagatcttcacggggctattatttcagtgacaaaatccaaatgcccctcttatgtgggtattacaggaatccttctacaggaaacaaagcacattttcaaaattatcaccaaagaagaccgcctgaaagttatccccaagctaaactgcgtgttcactgtggaaaccgatggctttatttcctacatttacgggagcaaattccagcttcggtcaagtgaacggtctgcgaagaagttcaaagcgaanggaacgattgacctgtgaattctttgccgtctaangcagttgtttatgacag

SEQ ID NO: 952 - DNA, 312 bp, Homo sapien
ctgatgggtctcatagtcctctgggatggtgtcattgcagcggtaacgcaggttggcccagatgatgttctcctgggagaagcagaagacccccaagcggccaccccgcatggttgtgtccaagaccacgttgctgtcggccaccagctcagggccctcatagaatcgcaccctgatgtagcccacttggggccggtgctgcaggaaccaacgataggacttcttgtccttccaacccacgtttcgcgggtccttccacagcagccgcacctgagactctgtgtctcctgtatgccacagagcgttccgcag

SEQ ID NO: 953 - DNA, 397 bp, Homo sapien
cgcgtccactgccgaccctcttggtttctgaaaccaacctttcttcctgctctcctctttaagagcaaaccccaacatgtataaggtcacagcaagtggtagccaggaaaagctgtgggacccctcatttgagtcacatccatatggcatggagaaagaaaacctctctgccagaaggaactgaactctggaagtcctaaggaaggtcaccatgatcagcagataggaaagcattgccaagggctgtccctcaagagcttagttttcttagggagaccagaaagacatcagatcctgactgccctgttttgctcaagttctgaaatgagtggcatgatgaagagctggtggagctgagggaaagagtcaaccatgtggggtggggtagtgaggaagg

SEQ ID NO: 954 - DNA, 304 bp, Homo sapien
cctttgtaccgggccagcaactggaagggcacagtgtggaattccagggcctgcagagtcttcttctggaacagggcctcgtggctccagtacagggacaggttgaactgcagctcaaagagctcctcagggagcatcatggggaagcggatcttctccaccaagccctccacctcctcatgggaggcacgctccccccagctccaggtgtccacggccttcagtagggccagctcgctgggcaccgccaggtcgctcctgggcagcagcagttggagcaggtctgtggggacactgggccagg

SEQ ID NO: 955 - DNA, 156 bp, Homo sapien
ctgtttcaactccctgccaagaaaaatgtagatgcaattctggaggagtatgcaaattgcaagaaatcgcagggaaatgttgataataaggaatatgcggtcaatgaagttgtggcaggaataaaagaatatttcaatgtgatgttgggcactcag

SEQ ID NO: 956 - DNA, 543 bp, Homo sapien
ctttcatctgaccatccatatccaatgttctcatttaaacattacccagcatcattgtttataaccagaaactctggtccttctgtctggtggcacttagagtcttttgtgccataatgcagcagtatggagggaggattttatggagaaatggggatagtcttcatgaccacaaataaataaaggaaaactaagctgcattgtgggttctgaaaaggttattatacttcttaacaattctttttttcagggacttttctagctgtatgactgttacttgaccttctttgaaaagcattcccaaaatgctctattttagatagattaacattaaccaacataattttttttagatcgagtcagcataaatttctaagtcagcctctagtcgtggttcatctctttcacctgcattttatttggtgtttgtctgaagaaaggaaagaggaaagcaaatacgaattgtactatttgtaccaaatctttgggattcattggcaaataatttcagtgtggtgtattattaaatagaaaaaaaaaatt

SEQ ID NO: 957 - DNA, 528 bp, Homo sapien
ctgtgatcaagatgtattaaaagaatatgaaagagcatctgggttattctagaagttctgtgatcaaaacatattaaaaaaaattaaagcgcatctgggttattctagaagttcctgggctttatacttggatatttacagaggaagttgaacttcaagttctgccactcttcaaaatgggtgacaggagaggacgtgataggacagttaaaaaaaaattgatagtcattctctgatggagtgaagcaagctttgtcaaccatcaacaaatatgacttcattggtcacaagccctgcagagatccaacaagatttgagttttaaatacagaacatatttcaaacagaaccagcagagtgctgatgtatgaatggaattgattgctgaaggcagagagtataaagaatctcaagaaacttttagtgccattttcatttaataagccattggtatagcaacctaaaaaccttggctgtgatgacaccaggatgtgtttatggaattgctgcaggagaacacaattggcag

SEQ ID NO: 958 - DNA, 451 bp, Homo sapien
ctgtctgaccatggggaccttctgtctgaagaggagctggatgaatgagactctgggaatcatctacacaggaccaaacccaacaggcgccctggcaccggggaggcgggtagttgtactctgcttgtacagtccttgagcccagtttacagatctggagagcaggaggccaggacaaggacaaaggctggaggatggagtaggacccaggggctctgccatcctaggcatcattcaaggtcttttatgaagactttacagatgtcctctgtaagtagcatcgagagtggagttcagctcctttctctacttttttttggtctgatggcacatatttattgttctgtggtctaatcacagtgtttctaaatgtaaaaagtgcatatgttggtgtagctagtcccgcgacattgagctcctctgcatgaagacactgggctcctgcatccag

SEQ ID NO: 959 - DNA, 158 bp, Homo sapien
ccagaccaaggctgctggacctatgggaatattcgggtgtctgtagaggatgtgactgtcctggtggactacacagtacggaagttctgcatccagcaggtgggcgacatgaccaacagaaagccacagcgcctcatcactcagttccactttaccag

SEQ ID NO: 960 - DNA, 235 bp, Homo sapien
ctgagcagggaatccggccggaggaaggagcagcttaccgactgcgggtgttcaccacaggccaggccctaatatgcacccactagtttagctcagactcctctctacatatgaatggcaaaggcacttttgatatacactgtaaaatacactgtattttagaatcggaatctattttctaatgttcccctcaagggctgagtggcaggaaggttgaggatgcaggactttgcag

SEQ ID NO: 961 - DNA, 375 bp, Homo sapien
cctggaaagaaaagggatatgtccagcgacttggagagagaccatcgccctcatgttagcatgccccagaatgccaactaaactcctccctttccttcctaatttcccttcttgcatccttcctataacttgatgcatgtggtttggttcctctctggtggctctttgggctggtattggtggctttccttgtggcagaggatgtctcaaacttcagatgggaggaaagagagcaggactcacaggttggaagagaatcacctgggaaaataccagaaaatgagggccgctttgagtcccccagagatgtcatcagagctcctctgtcctgcttctgaatgtgctgatcatttgaggaataaaattatttttccc

SEQ ID NO: 962 - DNA, 409 bp, Homo sapien
  misc_feature (1)...(409): n = A,T,C or G
ctggggaggccccncgggcctctcangtggacaggtccaggcattggttgaagctggatgaagctggggcctnngctcctnctcatcaaatacagatcactgngaccctgtcctcctccatggtgctggtctcctcggccccactgcccctgcttctgctttcttcctccacctcctcctcccccagctccatgtccagctcgttgcctgcctctgagggtgtgtaggtggagccactgatggaacggcagctaaagaagacgattcgcttgagccgcttgttgtagaagaagtagttgaaggaccagaggctaccatcctccccgaagggatctgagtccaagtctgggttatagctgtagatgtcacattcagccaggcagatctcctcgtccaccgcgttccacag

SEQ ID NO: 963 - DNA, 163 bp, Homo sapien
gccatggcgtcctatttcgatgaacacgactgcgagccgtcggaccctgagcaggagacgcgaaccaacatgctgctggagctcgcaaggtcacttttcaataggatggactttgaagacttggggttggtagtagattgggaccaccacctgcctccaccag

SEQ ID NO: 964 - DNA, 344 bp, Homo sapien
ccactggctgagttattggcctggcaggtatagagtccgctgttcttctcagtgatgttggagataaagagctcttgtgtgtgttgctggatgttcccatcaatcagccaagaatactgtgcaggtgggttagaggctgcatggcaggagaggctgaggttcacccctggacggtaataggtgtatgagggggaaatggtggggtcgtctgggccatagaggacattcaggatgactgggtcgctgtggtcaacacttaattcgttctggattccacactcatagggtcctacatcattccttgtgacactgagtagagtgagggtcctgttgtcattggacag

SEQ ID NO: 965 - DNA, 461 bp, Homo sapien
ctgagctttcagcagataaatcacagcagaaatagaatcaccctaggactttcaatcaaaagctggaagtccaccttacagaaagacaaaaagaaacccctttttatatcttaacaaagcaatagctctcaagcagcagagcatctcgaggaaggaagcttgcccggtcgccatcccatcatgccagagcgtgcagtgtccacccttgactacgctggggaattgctgattttttgaaaaagcttaacttaacaatttctgatgtctatcttttagagttctgtatgttcccattttttattcttctgaattttgaattgcaagtagctgtaaaatccaatctttgagtgcatgggggtgggtgtgaggcggggctcagcttcaaccccctgtcctgtaaagcagtggctggtttttcctgagcccagccctgggaggtcgtggtaggtgtggaggctgca

SEQ ID NO: 966 - DNA, 246 bp, Homo sapien
cctttcacagacactaccattgagtgggttgatgcaggttgcagccttcagtccccgagtactgggttctgataaaattccacagaatccagcatcactgggctcagacggcatccactgtagtaaactatttgtaaatggggacatatcttcccagcaccagtaggacacattgatcttccgaaggccgacccatggggttaaggtgagcttggacatgctctgagatgactgcattattcgcag

SEQ ID NO: 967 - DNA, 244 bp, Homo sapien
ctggagcattggcagggacagtcagaaaggagacaagtgaaaacggtcagatggacacaggcggaggagaaaagacagagggagagagaccatcgggaacaatcagaggggccgagacgatcagaaaagggtcagcccgagacaggctgagccagagtttctagaagcagtttccaattcaacggctcgctttgagggccaacgtgtcctaggccgaggctgcagaagcgctcacacactcacg

SEQ ID NO: 968 - DNA, 436 bp, Homo sapien
ccaaagtctttaccctatttaaccccttgtatatttctgactgctcactgttcatattataggggaccagatttgtaatatagaattctccataacatgaatgaaattaatgctgtccaagccagcatggtggcttcatattaagtagtaacagaagtctgaacaattggataaatttgacttccaagacagctaaacttttcaactgcaattttaaaaactacactacactgttatagttaatctgacaaaaatgtcctcaaagagtactttattttatttaaagcatctgtttaattcaacctttaataattttgcaaagaagggtacgtgtgtattttaatatagcctgacctgaatttatatgtttttagctttagtatttaactttttgtaacaaataaaccttttttaaaacaagtttaaaaaagaaaaa

SEQ ID NO: 969 - DNA, 383 bp, Homo sapien
ctggctcccttgtctccagggctttggaggatcagggtagggagggctctgtctctaagccaggtgtcaggatcagaatcatgggtagaaggtgccattcagctcacagccgcacccagaatcctttgcagccctccttctttatttttttcccattgcattctgggagtccacatctggctttctcagccactgttcatcaccaggggttttaggaggaaggcttggctcctgtcttcccagacccaccatgcctggagaggtcaggatggaactacctcattcggcgaattagccccaaattgaacgctgaatcgtgtcccatgagatcaggcgccatctgtaaagtctcctctggaaatgccaatccatccttcccccag

SEQ ID NO: 970 - DNA, 543 bp, Homo sapien
ctgtagcttttgtgggacttccactgctcaggcgtcaggctcaggtagctgctggccgcgtacttgttgttgctttgtttggagggtgtggtggtctccactcccgccttgacggggctgctatctgccttccaggccactgtcacggctcccgggtagaagtcacttatgagacacaccagtgtggccttgttggcttgaagctcctcagaggagggcgggaacagagtgaccgagggggcagccttgggctgacctaggacggtcagcctggtccctccgccgaacaccgaagtgctactgtttgtatatgagctgcagtaataatcagcctcgtcctcagcctggagcccagagatggtcagggaggccgtgttgccagacttggagccagagaagcgattagaaacccctgagggccgatcagtgacatcataaatcatgagtttgggggctttgcctgggtgctgttggtaccaggagacatagttataaaaaccaacgtcactgctggttccagtgcaggagatggtgatcgactgt

SEQ ID NO: 971 - DNA, 416 bp, Homo sapien
ccagactgacttcaaaaaattaatgtgtatccagggacattttaaaaacctgtacacagtgtttattgtggttaggaagcaatttcccaatgtacctataagaaatgtgcatcaagccagcctgaccaacatggtgaaaccccatctgtactaaacataaaaaaattagcctggcatggtggtgtacgcctgtaatcccagtgacttgggaggctgaggcaggagaatcgcttgaacccgggaggcggaggttgcagtgagctaagatcgcaccactgtactccagcctgggcaacagcgagactccatctcaaaaaaaaaggaaatgtgtatcaagaacatgattatccaggggtattttctaattcagatcatcaaactgattatatagaagagttggctttaaaatgtttgca

SEQ ID NO: 972 - DNA, 242 bp, Homo sapien
ccaaaaatcccaaaacatcattttcaatcagtagagaagtgcttagggttgaaaattgatttcatttgctactgaatttggtaaatcctgggtaacttttatcaagatgaagacattttaccctacctactctagaaatatacaacaatgttatattttacactccttggaaacatttgaggaaaaaaatgcaatttgcacttcactttgttggaatatcccatagcactcaataaactcag

SEQ ID NO: 973 - DNA, 347 bp, Homo sapien
cctgcaggggatggaaccttccagaagtgggcggctgtggtggtgccttctggagaggagcagagatacacctgccatgtgcagcatgagggtctgcccaagcccctcaccctgagatgggagctgtcttcccagcccaccatccccatcgtgggcatcattgctggcctggttctccttggagctgtgatcactggagctgtggtcgctgccgtgatgtggaggaggaagagctcaggacattttcttcccacagatagaaaaggagggagttacactcaggctgcaagcagtgacagtgcccagggctctgatgtgtctctcacagcttgtaaagtgtgagacag

SEQ ID NO: 974 - DNA, 571 bp, Homo sapien
gaaagagcgagatgcgagaacacttttggctaaaaatctcccttacaaagtcactcaggatgaattgaaagaagtgtttgaagatgctgcggagatcagattagtcagcaaggatgggaaaagtaaagggattgcttatattgaatttaagacagaagctgatgcagagaaaacctttgaagaaaagcagggaacagagatcgatgggcgatctatttccctgtactatactggagagaaaggtcaaaatcaagactatagaggtggaaagaatagcacttggagtggtgaatcaaaaactctggttttaagcaacctctcctacagtgcaacagaagaaactcttcaggaagtatttgagaaagcaacttttatcaaagtaccccagaaccaaaatggcaaatctaaagggtatgcatttatagagtttgcttcattcgaagacgctaaagaagctttaaattcctgtaataaaagggaaattgagggcagagcaatcaggctggagttgcaaggacccaggggatcacctaatgccagaagccagccatccaaaactctgtttgtcaaa

SEQ ID NO: 975 - DNA, 221 bp, Homo sapien
  misc_feature (1)...(221): n = A,T,C or G
ctggaggtgcctcanaaggtgcattctgcttcctgcaggggcttgaaacaccaaggcactccagggatcctggagtcaaagcagcagccccggttgttgcactccttgggggtgacatgggggtagccgcagtccaccctgtccttggctggcacggcacactggtttgcagacaggcccacgtactcctcagcagagctggaggacagcaaggccaggac

SEQ ID NO: 976 - DNA, 316 bp, Homo sapien
ccatcagattgtcacagacttttataaccctttgatccctaccaacgttaagtatgagtttggccctgccatcttcattggctgggcagggtctgccctagtcatcctgggaggtgcactgctctcctgttcctgtcctgggaatgagagcaaggctgggtaccgtgcaccccgctcttaccctaagtccaactcttccaaggagtatgtgtgacctgggatctccttgccccagcctgacaggctatgggagtgtctagatgcctgaaagggcctggggctgagctcagcctgtgggcagggtgccggacaaagg

SEQ ID NO: 977 - DNA, 335 bp, Homo sapien
cctgtttgtctgtacagcaatgcagatgcgcaggcccatcctggtggaggacccagatgcagggagcaaatattcgggttgtgttgctaagagtcgcaggaactactgctagtgatactaggcttgctgcaggaggatgtcacgctgagaaagggagatgactaggagcagaaaaagtactctcactgttccagcttccagcccaatcctagcagaatgaatgcattttaaaatcagtccacattcacatgtgctgagaaggttgttagtggtccctcatctgggcaaagcagacccaagatggtgctaagtgcagagtgcagagcattcttgtg

SEQ ID NO: 978 - DNA, 280 bp, Homo sapien
cctaacacccaagctcttccttgcagaagagctgagatgctaaggagaccatctggagtgtcataataagcccttgggatttgctgagctcccacatggctttcttcaaccacctggcccactttcttcaaccacattccactttggaatgcgtgtctttaaggcaccaagtgatcttaagaatgggctctgtttttgaattcagcaatccaagttcctatctatctcggtgggacctccaaaaaaaagaaaaaggattggcttggcttctaatgtaagg

SEQ ID NO: 979 - DNA, 318 bp, Homo sapien
ctgtccagatgacagtaagattccactgtctgtaatcctcatggtgccaggtctcctggggcatctagggcaatgatgctactgcagtttatgcagttacacagtcaagtctgtgccaaaggaggtcccatccggcggccaggtttctgttcagtctggggagcaatgccaactggctgcccccatagcctggcatgagctgatggcccagtgcaatcccaaagcaaagaagggcagaactgggccaagaagctgtggtaatttgctctccctgcctccgacagcgtcgtcctctccttttgcagccccacacgcagg

SEQ ID NO: 980 - DNA, 568 bp, Homo sapien
ccagcactggctccttgatggttttcctaggacattaggacaagccgaagccctggacaaaatctgtgaagtggatctagtgatcagtttgaatattccatttgaaacacttaaagatcgtctcagccgccgttggattcaccctcctagcggaagggtatataacctggacttcaatccacctcatgtacatggtattgatgacgtcactggtgaaccgttagtccagcaggaggatgataaacccgaagcagttgctgccaggctaagacagtacaaagacgtggcaaagccagtcattgaattatacaagagccgaggagtgctccaccaattttccggaacggagacgaacaaaatctggccctacgtttacacacttttctcaaacaagatcacacctattcagtccaaagaagcatattgaccctgcccaatgggagaaccaggaagatgtggtcattcattcaatagtgtgtgtagtattggtgctgtgtccaaattagaagctaactgaggtagcttgcagcatctcttctagttgaaatggtgaactgataggaaaaca

SEQ ID NO: 981 - DNA, 550 bp, Homo sapien
ccatccccctttagaacgtatcttaatgtgaacataaattgttcttcatgatgcttaaaagcttacatataattttcattcttagaaaaacgccacattttggatcctggatttttctgaatatcatgattgaaaaaaacaaaacaaaaaatgaacccaaatcaaagtgtggttaaacttatatgagaaagatttttcaaccagatggtcattcaaaaaagttggagctgtaagtgccggcgactgaggacacagggttaattcctcgctgctggtggaaggctagagaacatcttcaaaagagggtagcaagacgtgctcctaggggaggctcagtgtggtctcgtctgcccaagcattttcagtcttgcttggtcaatgacatcgagtaagtttttggcatccacagccagggcgtgagcagcagtcagcatttgctttttgtactcttgctggaggctggtcatgacatactgctgggccagtttcatcttgttgatgagctcacccaggtcagagttcaatagcttctgtgccatctcaatctctc

SEQ ID NO: 982 - DNA, 524 bp, Homo sapien
ccaaggtcagaggctgatgcaacaggccctcttctccccagggccaggctcctgtccagcctgggcactgcccagagtgatggcattggtccggatgctgttctgtctctgcttggacaccttcgcaaagatttctttcaggacagtctcaaaggctagctcaacattggtagagtccagggctgaggtctccaggaagagcagtccattgttttcagcgaacattcgggcctcctcagtgggcacttcccgggcctggctgaggtcacttttgttacccacgagcatgacgacgatcgtggcttcagcatggtcatagagctccttcagccatcgctccaccacagcataggtctggtgcttggttaggtcaaacaccaggagggcccccactgcaccacgatagtacccttgaagacaaagttataatcttcctcagttccattccccatcttggctccgcatggagggtgcaggtgtcttcggggacagaggcgacaaatctgtgtgttggctcaatgccc

SEQ ID NO: 983 - DNA, 140 bp, Homo sapien
ccttcgtgccctaacagccagtcccctgttaaagtggaagagacctgtggctgccgctggacctgcccctgtgtgtgcacaggcagctccactcggcacatcgtgacctttgatgggcagaatttcaagctgactggcag

SEQ ID NO: 984 - DNA, 358 bp, Homo sapien
tggagcggccgcccggcaggtccaacgagtcacaacagtgcaataggtagaggattaaaaactgcatcaaacaggtgctgaaaataaatactacctaggagaaggaggtgagagccctcgtgtggggtttgttttcgaccccttgagtgtgtgtggggtttgtcttccgagccacgagcctggcctgtctcgcggtgctgttcactctgacagagtgcgcctgcagcacgttgcctccagggcccagcctcccagaagcctcagagcatcagagcatccgtcccatcggatggaccagaaacaagaaaatggggtggggtgaatcacagctatcattcaaaggaaaggaatttttttc

SEQ ID NO: 985 - DNA, 450 bp, Homo sapien; identical to SEQ ID NO: 830

SEQ ID NO: 986 - DNA, 340 bp, Homo sapien
cctcctgccagcagttcttgaagcttctttttcattcctgctactctacctgtatttctcagttgcagcactgagtggtcaaaatacatttctgggccacctcagggaacccatgcatctgcctggcatttaggcagcagagcccctgaccgtcccccacagggctctgcctcacgtcctcatctcatttggctgtgtaaagaaatgggaaaagggaaaaggagagagcaattgaggcagttgaccatatccagttttatttatttatttttaatttgtttttttctccaagtccaccagtctctgaaattagaacagtaggcggtatgagataatcagg

SEQ ID NO: 987 - DNA, 227 bp, Homo sapien
ccaatgcccggagcaggccctctttccatcccgtgtcggatgagctggtcaactatgtcaacaaacggaataccacgtggcaggccgggcacaacttctacaacgtggacatgagctacttgaagaggctatgtggtaccttcctgggtgggcccaagccaccccagagagttatgtttaccgaggacctgaagctgcctgcaagcttcgatgcacgggaacaatgg

SEQ ID NO: 988 - DNA, 241 bp, Homo sapien
cctctttttaccagctccgaggtgattttcatattgaattgcaaattcgaagaagcagcttcaaacctgccggggcttctcccgccttttttcccggcggcgggagaagtagattgaagccagttgattagggtgcttagctgttaactaagtgtttgtgggtttaagtcccattggtctagtaagggcttagcttaattaaagtggctgatttgcgttcagttgatgcagagtgggtttt

SEQ ID NO: 989 - DNA, 193 bp, Homo sapien
ccagccgtgtcccagacttgtagtttgatcttcttcccctctatatccacagtgcggatcttgaaatcaattccgatggtggagatgtaagtgttgttgaagttgtcctctgcaaagcgaatgatcagacaagtcttgcccacccccgagtccccgatcagcagcaacttgaagaggtggtcgtaggctttgg

SEQ ID NO: 990 - DNA, 499 bp, Homo sapien
cctcaaccaagagggttgatggcctccagtcaagaaactgtggctcatgccagcagagctctctcctcctccagcaggcgccatgcaagggcaggctaaaagacctccagtgcatcaacatccatctagcagagagaaaaggggcactgaagcagctatgtctgccaggggctaggggctcccttgcagacagcaatgctacaataaaggacacagaaatgggggaggtgggggagccctatttttataacaaagtcaaacagatctgtgcgttcattcccccagacacacaagtagaaaaaaaccaatgctgtggtttctgccaagatggaatattcctcctcctagttccacacatggcgtttgcaatgctcgacagcattgcactgggctgctgtctctgtgttctggcaccagtagcttgggccccatatacacttctcagttcccaacaagggcttatgggccgaggggcaggctccaattttcaagcacacga

SEQ ID NO: 991 - DNA, 262 bp, Homo sapien
ctgccagccaggctgtggtcagtcctctggcaggcaatcttcggcaccgagagcctctgtccattagtgtcagccccgagggggccacgacggaggccgcccaatgtccactgtgatattggtgaagagtggttgccgagacacctccaagacctggtaccgcactgacccaatgccgtcccgcttcatggtcagcttcgtgttttgaatcttggtaaacctctgagggttaggttcgttatgcttgtcgcggtcgtgcttg

SEQ ID NO: 992 - DNA, 535 bp, Homo sapien
  misc_feature (1)...(535): n = A,T,C or G
ctgctgcttgtgaaattcatgtgtggtactaagtaccttacatgaattatttcatttaaccctcccaacagtctcctttgtacgtgctgnnctctctgcctggaaacactgtttcccacccccaacccccaattcttctgtttatttttcttgagacagagtctcactgtgtagcccagactggagtgcagtggcgcgatctcggctcactccaatctccgcctcccgggtccctgttcaagcagttctcctgcctcagcctcctgagtagctgggattacaggcacacgccaccatgtccagctaatttctgtatttttagtagagatggggtttcacgatgttggctaggatggtctcgatctctggtcagagtcttttctgtaaatatccttggtaaagaagcaattttagactgtagctgttgcaaatgctttaaggaagaagcaaaacaactgtcagtcttnctgaaatgaagaaactacaccagggctgctatatcagagcaaccccaaccagcactncaatcatgatg

SEQ ID NO: 993 - DNA, 232 bp, Homo sapien
ctgctgctctcccctcccagtctctactcactgggatgaggttaggtcatgaggacaccaaaaacctaaaaataaacaaaaagccaaacaagccttagcttttcttaaaggctgaaatgcctggaagtgtccctttatttataaaataacttttgtcatatttcttatacatgtttcttgtaagaaattcagaaactacagacaaagagagtggaaattacccactgtcagg

SEQ ID NO: 994 - DNA, 203 bp, Homo sapien
ccagcagatcatccacgacgaccaccctctgtcctggctccagggcgtctttctgaatctccagctcagccttcccgtactccagggaataggaggcccacagagtggggcctggcagcttcccccgctttcggatgagcacgcagcccagtccaagctcctgggccagggaggggccaaagaggaagcctcgggagtctagg

SEQ ID NO: 995 - DNA, 238 bp, Homo sapien
ccatgcctgccccgcccactctgtatatatgtaagttaaacccgggcaggggctgtggccgtctttgtactctggtgatttttaaaaattgaatctttgtacttgcattgattgtataataattttgagaccaggtctcgctgtgttgctcaggctggtcccaaactcctgagatcaagcaatccgcccacctcagcctcccaaagtgctgagatcacaggcgtgagccaccaccagg

SEQ ID NO: 996 - DNA, 379 bp, Homo sapien
ctgcagcctgggactgaccgggaggctctgaccatttacccaccacaggtaggttgtgttctgaacctcaggttcacaggtgaaggccacagcatccttgtcctccacggggttggagttgttgctggagatggagggcttgggcagctccgggtatacatggaactgtccggttgcttcttcattcacaagatctgactttatgacttgtagggtatagaatcctgtgtcattctgggtgacgttctggatcagcagggatgcattggggtatattgtctctcgaccactgtatgcgggccctggggtagcttgttgagttcctattacatatcctacaattagactgttgccatccactctttcgcctttgtaccag

SEQ ID NO: 997 - DNA, 210 bp, Homo sapien
ccatccgaagcaagattgcagatggcagtgtgaagagagaagacatattctacacttcaaagctttggtgcaattcccatcgaccagagttggtccgaccagccttggaaaggtcactgaaaaatcttcaattggattatgttgacctctaccttattcattttccagtgtctgtaaaggccgtggagaagtgtaaagatgcaggattgg

SEQ ID NO: 998 - DNA, 207 bp, Homo sapien
  misc_feature (1)...(207): n = A,T,C or G
ggtggctgtgctgggggcgccccacaaccctgctcccccgacgtccaccgtgatccacatncgcagcgagacctccgtgcccgaccatgtcgtctggtccctgttcaacaccctcttcatgaacccctgctgcctgggcttcatagcattcgcctactccgtgaagtctagggacaggaagatggttggcgacgtgaccggggccca

SEQ ID NO: 999 - DNA, 315 bp, Homo sapien
ccaatgggctttgctgtagcttgctgaaatcaccaagcaggagagatttaaccagaggcgatgtgtccagtcaccagcatagagccatcctctgtgtcaccatccacacgcagggccttctggcagacctcatgcaatgccctccatgttaatattcatcagaaaatggataattaggggggccagcaaaaatatcaagggtcaaatatcgcacatttctgtttaggccatctatggctttcatctcctctgaagtcaactggaattcaaacacctgcacgttctgtctgatgcgctgctcattgtagctcttgg

SEQ ID NO: 1000 - DNA, 186 bp, Homo sapien
ctgttactcaagaagatgtatttaatgcttgacaataagagaaaggaagtagttcacaaaataatagagttgctgaatgtcactgaacttacccagaatgccctgattaatgatgaactagtggagtggaagcggagacagcagagcgcctgtattggggggccgcccaatgcttgcttggatcag

SEQ ID NO: 1001 - DNA, 173 bp, Homo sapien
ccacaaagcggaaactcatccacttttgcctttttccgccccaggtcaaaaatgcgaatcttggcatcagggacacctcggcagaagcgagactttgggtacggcttgttcttacaataccggtaacaacgggcggggcggcggcccatggcgacaccaggatcttcagtggc

SEQ ID NO: 1002 - DNA, 302 bp, Homo sapien
ctgaatgcctgagcccagcagggagctgaggatcatggggtactgggggggcctgaagacgtcgccgtgcaccaacttccacccagactcctccatggtgtcttcaatgtcatcctccttgttgtagttggcaatgtccttccggagggtccgaatgataatcatgctcaggatacctgacaggaagaagaccacaacaacggagttaatgatagaaaaccagtggatctggacgtcactcatggtcaggtaagtgtcccagcgagaggcccatttgatatcactttcctcccagtggacag

SEQ ID NO: 1003 - DNA, 368 bp, Homo sapien
cctgggcccgctgacttcagggtgaggccacagctactgcagcgctttttatttatttatttatttactgagatggagtcttgctctgtcacccaggctggagtgcagtggtgcaatctcggctcactgcaacctctgcctcctgggctgcagtgattctcctgcgttcaagtaattctcctgcctcggccttctgagtagttgggattacaggcatatgccaccacacttggctaattttttgtatttttagtagaaatggggtttcaccatgttggcgaggctggtctcgaactcccgacctcaaggatcctcctgcctcggcctcctaaggtgctgggattgcaggtgtgagccaccacgtctgg

SEQ ID NO: 1004 - DNA, 294 bp, Homo sapien
ctgggcggatagcaccgggcatattttggaatggatgaggtctggcaccctgagcagtccagcgaggacttggtcttagttgagcaatttggctaggaggatagtatgcagcacggttctgagtctgtgggatagctgccatgaagtaacctgaaggaggtgctggctggtaggggttgattacagggttgggcacagctcgtacacttgccattctctgcatatactggttagtgaggtgagcctggcgctcttctttgcgctgagctaaagctacatacaatggctttgtgg

SEQ ID NO: 1005 - DNA, 414 bp, Homo sapien
ctgaagcactcttcagagactacgtccacagacactgatgctgaggcctttcttgtaagtgaagaaaaaggaatgcagcaaagaagagttcgacattggagtccttagttccatcaggatcccattcgcagcctttagcatcatgtagaagcaaactgcacctatggctgagataggtgcaatgacctacaagattttgtgttttctagctgtccaggaaaagccatcttcagtcttgctgacagtcaaagagcaagtgaaaccatttccagcctaaactacataaaagcagccgaaccaatgattaaagacctctaaggctccataatcatcattaaatatgcccaaactcattgtgactttttattttatatacaggattaaaatcaacattaaatcatcttatttacatgg

SEQ ID NO: 1006 - DNA, 272 bp, Homo sapien
ccggagcccacggtggtcatggctgccagagcgctctgcatgctggggctggtcctggccttgctgtcctccagctctgctgaggagtacgtgggcctgtctgcaaaccagtgtgccgtgccagccaaggacagggtggactgcggctacccccatgtcacccccaaggagtgcaacaaccggggctgctgctttgactccaggatccctggagtgccttggtgtttcaagcccctgcaggaagcagaatgcaccttctgaggcacctccag

SEQ ID NO: 1007 - DNA, 313 bp, Homo sapien
  misc_feature (1)...(313): n = A,T,C or G
cctgccttactctnttccctttccccagggactcttggttttcagaagcccctctggaatgtcctacctggcctaaccccataccagcagtgcagacaaggaggcactcctactatagtgggtccagcccatggagagactcacttcctgccccaacacctcttcccctagaccctgagggccaggacaatgtcttagtgccttccaacttggcagagtgaggccccatgagacagagagaaagggggaagagggaaatacctttatccaaataaatacccatccaaaattatttgtgataggtgaaaaatgg

SEQ ID NO: 1008 - DNA, 317 bp, Homo sapien
cctcaatgtcgtgctagaggggccgaagaaggccgtgaacgacgtgaatggcctgaagcaatgtttggcagaattcaagcgggatctggaatgggttgaaaggctcgatgtgacactgggtccggtaccggagatcggtggatctgaggcgccagcacctcagaacaaggaccagaaagctgttgatccagaagacgacttccagcgagagatgagtttctatcgccaagcccaggccgcagtgcttgcagtcttaccccgcctccatcagctcaaagtccctaccaagcgacccactgattattttgcggaaatgg

SEQ ID NO: 1009 - DNA, 456 bp, Homo sapien
tttttttgtagggtatagaaaatacatttttaattttgatagagttcacaaatgacagcattgacatttctttaaacaaatacttctgtcaaggcacagcattaccatgtgtccccagatgcccaagaggcagtgatttcatgtccccctgaggtttagcagagccaccaatgtcaatagggtggctgacggggcctagatttgctaccagataagccaatgagacatgctgtcagatttatggttacataatcaagtatttaaaaagatgcacaataggtaactgcaatgagcttgttctgcatttagcgatagttcctttcaaacaaagaagatagttttcagtatcaagaaggatgcctatatgtatgtcttccatggagcctttcctacaaattgctttcattacacattaaaaggagttcagctttattgtgaccttcttgagtcattcag

SEQ ID NO: 1010 - DNA, 196 bp, Homo sapien
ctgggcatgggctgaggagaggtcttgcttgcccccttcaactttccatctcagaactataaactgctaggctgcaaggagagaagggctaagtgggggtcagacaggagagaagggcaggaggcagtgagccccgatgacccaccaactccaccaggccctgacagggaagcccctttggttagtatcattttgg

SEQ ID NO: 1011 - DNA, 449 bp, Homo sapien
ccttgcggctgctgcgaaaggccacggcgctgcctgcccgccgggccgagtactttgatggttcagagcccgtgcagaaccgcgtgtacaagtcactgaaggtctggtccatgctcgccgacctgaaggagagcctcggcaccttccagtccaccaaggccgtgtacgaccgcatcctggacctgcgtatcgcaacaccccagatcgtcatcaactatgccatgttcctggaggagcacaagtacttcgaggagagcttcaaggcgtacgagcgcggcatctcgctgttcaagtggcccaacgtgtccgacatctggagcacctacctgaccaaattcattgcccgctatgggggccgcaagctggagcgggcacgggacctgtttgaacaggctctggacggctgccccccaaaatatgccaagaccttgtacctgctgtatgcacag

SEQ ID NO: 1012 - DNA, 289 bp, Homo sapien
  misc_feature (1)...(289): n = A,T,C or G
ccaggaccacaaccccacgctgtagctggtagcgcagggcaatcagggctggggttcgcttgtgcttttttgccaaggcacaaaggactgggtcctccaagagcaccggggagttcgggtccacccatggttcttctcggtgggatcccagagcactataggcaaccagaacaatgtcttttgacttgcagaaatccagcagttttctctggttgaagtaaggatgacattccacctggttgcagacaggcttgtacttgagccctggcttgtnnaggatcatctccag

SEQ ID NO: 1013 - DNA, 221 bp, Homo sapien
  misc_feature (1)...(221): n = A,T,C or G
tctgtaaatgctgcgttcctaatttagtaaaataaaagaatagacactaaaatcatgttgatctataattacacctatgggatcaataagcatgtcannactgattaatgtctactgtaaaaatttggtagnnaaattttcatttgatattagatataaatatctgaatataaataattntaatatactagtcatgatgtgtgttgtattttaaaaattat

SEQ ID NO: 1014 - DNA, 512 bp, Homo sapien
gggcccccgaagcctctacaatgggctggttgccggcctgcagcgccaaatgagctttgcctctgtccgcatcggcctgtatgattctgtcaaacagttctacaccaagggctctgagcatgccagcattgggagccgcctcctagcaggcagcaccacaggtgccctggctgtggctgtggcccagcccacggatgtggtaaaggtccgattccaagctcaggcccgggctggaggtggtcggagataccaaagcaccgtcaatgcctacaagaccattgcccgagaggaagggttccggggcctctggaaagggacctctcccaatgttgctcgtaatgccattgtcaactgtgctgagccggcgacctatgacctcatcaaggatgccctcctgaaagccaacctcatgacagatgacctcccttgccacttcacttctgcctttggggcaggcttctgcaccactgtcatcgcctcccctgtagacgtggtcaagacgagatacatga

SEQ ID NO: 1015 - DNA, 553 bp, Homo sapien
  misc_feature (1)...(553): n = A,T,C or G
ctgggcaggaagattatgatcgcccgaggcccctctcctacccagataccgatgttatactgatgtgtttttccatcgacagccctgatagttcagaaaacatcccagaaaagtggaccccagaagtcaagcatttctgtcccgacgtgcccatcatcctggttgggaataagaaggatcttcggaatgatgagcacacaaggcgggagctagccaagatgaagcaggagccggtgaaacctgaagaaggcagagatatggcaaacaggattggcgcctttgggtacatggagtgctcagcaaagaccagagatggagtgagagaggtttttgaaatggctacgagagctgctctgcaagctagacgtgggaagaaaaaatctgggtgccttgtcttgtgaaaccttgctgcaagcacagcccttatgcggttaattttgaagtgctgtttattaatcttagtgtatgattactggcctttttcatttatctataatttacctaagattacaaatcangaagtcatcttgctaccagtatttagaagccaact

SEQ ID NO: 1016 - DNA, 431 bp, Homo sapien
ccacttcacatgatggcgggcctttaagagcacaaagaagtttaatatggacaacaacaggaaaaagcaagaagaaaacaagtagggaaagacagctaacctggagagagagaatttctttaacctttatgttcttcattaaaaatcttatcttggactgatttgagggatttttagaaacatggccttattttatataagcattaccttcccaggaatctttgttgtatattaatttttgataaccatttgattaactttaaaattaagtatatgtgtgtatatatacatatgtatgtttatatacacacatgtatctgtatagttttatatatacatatatacacatagacatacagagaaccactactttgtaatagtgtacagtttgttttatatctctttactttttttgttactattttatctgt

SEQ ID NO: 1017 - DNA, 490 bp, Homo sapien
  misc_feature (1)...(490): n = A,T,C or G
ctggaagaacaaggcgaagttctggtggctgtctgcgatgaatgtgcccttggctttggctgggtatgtcacccgggtagttttgggtgcaatgctctgatccttatccacggtggaaagatcaacatttgtgatgccaacttcagtggagatcttgactctgagctctacggtatttgcaatataccggttgtcaccttcaacttcgacaaggaagtcataataaccactggaaaatttgacgttcatgaaatttagttcaaaaacatcccctacaggggtgaaggatgtcttctggaggacagtggctctggaagcaacagatttagcatgttctagtttaacagtggcctgagtcagaggctgagacagaacattggtgacttgcaaccgcaagatagcctgttcatgagtgtcggaagcaganccctcangcacaaccacaactggcacgtggtagcgattatgcgagagcacaggcagacctcgg

SEQ ID NO: 1018 - DNA, 503 bp, Homo sapien
ggagtaagctgagtacaagtaccatagcagcagagctgcaaaaggtcttgggacctatagtcctaatgcaagataaggtcatggggcctaaggccatggggcctgaggcacccctagaccctgagccttcagcatttaagggagggtgtccccccattctcgataggccatggtacacagatgggtctagccgaggtgctataactgcttggaccactgttgcagtccaacctagtactgacactatatggtttgaaacccggtgtggacaaagtagccaatgggctgaacttagagcagtgtggatggtgatcaccaaggaggtgacactgatggtaatctgtatcaatagctgggtggtctaccaaggcttaactttgtggttaactacctggaaaatacagaagttgctagtcggccaccaacccatttggggtcaagccacgtggcaagacctctgggaaatgggtcatcagaaacaggtaaccgtttatcatgtgtca

SEQ ID NO: 1019 - DNA, 348 bp, Homo sapien
cctgtgtatggagtagaggcgggtgcacgggtactgttcctcacggcagtcaagaggcccaggctctgtgggctccagctctgcatttcccggttctggggttggggctgggatgacttcctgttggacttgctgctgggactggaactggaactgttcctcggagggccgaggagtcacctcttgataatcatagtagtctgggttgtcgatctggtcgctatagtgggtgtactggacgtggtcagggaacggcggcagcgggtccaggtcatactggccctgagccagcaagcctgcaggcaggaatagcaggaagaggtaggcagctctcatggcaacaaagag

SEQ ID NO: 1020 - DNA, 260 bp, Homo sapien
ccacacggcgaccgagggacagatggggccctgcgtcccataggctgcctgaaggtgggtagggcggcctgcggcatagtggggtggctgtgggctcccagcctggcccctgggaaccgtgggagcacagggacaagcacatggctatggaatgcagggtgacccaaggacaagcgagttgcggggatctctactgtgaccatgcagaattgatcgcagtctgctgcgccaccaccacctcatgttcccgaggggaacag

SEQ ID NO: 1021 - DNA, 407 bp, Homo sapien
ccttatgactataacggcccacgagaaaaatatggaatcgttgattacatgatcgagcagtccgggcctccctccaaggagattctgaccctgaagcaggtccaggagttcctgaaggatggagacgatgtcatcatcatcggggtctttaagggggagagtgacccagcctaccagcaataccaggatgccgctaacaacctgagagaagattacaaatttcaccacactttcagcacagaaatagcaaagttcttgaaagtctcccaggggcagttggttgtaatgcagcctgagaaattccagtccaagtatgagccccggagccacatgatggacgtccagggctccacccaggactcggccatcaaggacttcgtgctgaagtacgccctgcccctggttgg

SEQ ID NO: 1022 - DNA, 140 bp, Homo sapien
ccaccccagagtgggagaggctgggaggttgggaggctgtggagagaagtgagcaaggtgctcttgaacctgtgctcattttgcaattttatcagtaatttgacttagagtttttacgaaacctcttttgttgtccttgc

SEQ ID NO: 1023 - DNA, 280 bp, Homo sapien
ctggaggtgcctcagaaggtgcattctgcttcctgcaggggcttgaaacaccaaggcactccagggatcctggagtcaaagcagcagccccggttgttgcactccttgggggtgacatgggggtagccgcagtccaccctgtccttggctggcacggcacactggtttgcagacaggcccgcgtactcctcagcagagctggaggacagcaaggccaggaccagccccagcatgcagagcgctctggcagccatgaccaccgtgggctccgggacgcagc

SEQ ID NO: 1024 - DNA, 274 bp, Homo sapien
  misc_feature (1)...(274): n = A,T,C or G
cctggctgagcaggcagagcaccctgggaccccagggcagaaggacccctgccctccagtccccaagacccaggcccgtctccactcatacacgccacctacatgtgacgtcagccctgaaaaggtaacaggaaagttcagaacaaaaacaaaaccccaaaagtaaaaaggctacgtgtagcagagtaataccggaaacgttatatacacaggcggtgatggccccctcggaagtgtccgggtcacttagggggcactgcanaggtccctgtgg

SEQ ID NO: 1025 - DNA, 446 bp, Homo sapien
  misc_feature (1)...(446): n = A,T,C or G
gcaaagagtgtactgtgcttgaggcagagcactcacacataaatggctgtgtgtggaattgcttgccaaagaagtttctagcctttccctttcccctaactgcatcagggaagaattcttatctctagcttggtttccacatgaggtttttctgagaagggcttgggacaagaagtctgtcatgttagttaagcaggcaagaaatcctactaatccagttttgtttgaaagttgtttgtccgtatgattttttaaaagtcaagtttaatttcaaaaaaccttttttttctgagattacttttggggtaatatttaaaatgagagacattttgtaaccctgtaaaatacatagggaatataacattccagtgtatacaaagaaggcaaattctttaatcaaataaagcgcattataaaatcaaaaaanaaanaaaaaaaanaaaaaa

SEQ ID NO: 1026 - DNA, 189 bp, Homo sapien
ctgtgagagagatgctcaatatgccccaggctatgacaaagtcaaggacatctcagaggtggtcacccctcggttcctttgtactggaggagtgagtccctatgctgaccccaatacttgcagaggtgattctggcggccccttgatagttcacaagagaagtcgtttcattcaagttggtgtaatcag

SEQ ID NO: 1027 - DNA, 92 bp, Homo sapien
ccagaccctccttagtacaggatctcggaccacaaaccaaggagtctcgtggccttggattcccagaccctaggatggtatccctctgacag

SEQ ID NO: 1028 - DNA, 438 bp, Homo sapien
ctgaaaagccatctttgcattgttcctcatccgcctccttgctcgccgcagccgcctccgccgcgcgcctcctccgccgccgcggactccggcagctttatcgccagagtccctgaactctcgctttctttttaatcccctgcatcggatcaccggcgtgccccaccatgtcagacgcagccgtagacaccagctccgaaatcaccaccaaggacttaaaggagaagaaggaagttgtggaagaggcagaaaatggaagagacgcccctgctaacgggaatgctaatgaggaaaatggggagcaggaggctgacaatgaggtagacgaagaagaggaagaaggtggggaggaagaggaggaggaagaagaaggtgatggtgaggaagaggatggagatgaagatgaggaagctgagtcagctacgggcaagcgggcag

SEQ ID NO: 1029 - DNA, 330 bp, Homo sapien
ccagccgcatgggagtggaggcagtcatcgccttgctagaggccaccccggacaccccagcttgcgtcgtgtcactgaacgggaaccacgccgtgcgcctgccgctgatggagtgcgtgcagatgactcaggatgtgcagaaggcgatggacgagaggagatttcaagatgcggttcgactccgagggaggagctttgcgggcaacctgaacacctacaagcgacttgccatcaagctgccggatgatcagatcccaaagaccaatcgcaacgtagctgtcatcaacgtgggggcacccgcggctgggatgaacgcggccgtacgctcag

SEQ ID NO: 1030 - DNA, 228 bp, Homo sapien; identical to SEQ ID NO: 903

SEQ ID NO: 1031 - DNA, 294 bp, Homo sapien
ccacaaagccattgtatgtagctttagctcagcgcaaagaagagcgccaggctcacctcactaaccagtatatgcagagaatggcaagtgtacgagctgtgcccaaccctgtaatcaacccctaccagccagcacctccttcaggttacttcatggcagctatcccacagactcagaaccgtgctgcatactatcctcctagccaaattgctcaactaagaccaagtccccgctggactgctcagggtgccagacctcatccattccaaaatatgcccggtgctatccgcccag

SEQ ID NO: 1032 - DNA, 278 bp, Homo sapien
ggaggtattacagacagcactgcactttggagttgggcagctacatcgaggacctctttgtggtccacagtgacctctccagcattgtgatcctggataactccccaggggcttacaggagccatccagacaatgccatccccatcaaatcctggttcagtgaccccagcgacacagcccttctcaacctgctcccaatgctgggtgccctcaggttcaccgctgatgttcgttccgtgctgagccgaaaccttcaccaacatcggctctggtgacgg

SEQ ID NO: 1033 - DNA, 155 bp, Homo sapien
  misc_feature (1)...(155): n = A,T,C or G
cgcgttcanccatgttnaaaccgattgcatnaacttcgaaaccggcccgcccgccggcgcctggagaggggcanngggagaagcagagagtttatcattcatctgtacacatagacgtttcttctttaaataacaccacgggcgggagccccatc

SEQ ID NO: 1034 - DNA, 401 bp, Homo sapien
ctggaccagcaccccattgacgggtacctctcccacaccgagctggctccactgcgtgctcccctcatccccatggagcattgcaccacccgctttttcgagacctgtgacctggacaatgacaagtacatcgccctggatgagtgggccggctgcttcggcatcaagcagaaggatatcgacaaggatcttgtgatctaaatccactccttccacagtaccggattctctctttaaccctccccttcgtgtttcccccaatgtttaaaatgtttggatggtttgttgttctgcctggagacaaggtgctaacatagatttaagtgaatacattaacggtgctaaaaatgaaaattctaacccaagacatgacattcttagctgtaacttaactattaagg

SEQ ID NO: 1035 - DNA, 333 bp, Homo sapien
ctgagctgggggttgaatttctccaggcactccctggagagaggacccagtgacttgtccaagtttacacacgacactaatctcccctggggaggaagcgggaagccagccaggttgaactgtagcgaggcccccaggccgccaggaatggaccatgcagatcactgtcagtggagggaagctgctgactgtgattaggtgctggggtcttagcgtccagcgcagcccgggggcatcctggaggctctgctccttagggcatggtagtcaccgcgaagccgggcaccgtcccacagcatctcctagaagcagccggcacaggagggaaggtgg

SEQ ID NO: 1036 - DNA, 198 bp, Homo sapien
ccaatgtacatggtggactatgccggcctgaacgtgcagctcccgggacctcttaattactagacctcagtactgaatcaggacctcactcagaaagactaaaggaaatgtaatttatgtacaaaatgtatattcggatatgtatcgatgccttttagtttttccaatgatttttacactatattcctgccaccaagg

SEQ ID NO: 1037 - DNA, 289 bp, Homo sapien
ctggagatgatcctcaacaagccagggctcaagtacaagcctgtctgcaaccaggtggaatgtcatccttacttcaaccagagaaaactgctggatttctgcaagtcaaaagacattgttctggttgcctatagtgctctgggatcccaccgagaagaaccatgggtggacccgaactccccggtgctcttggaggacccagtcctttgtgccttggcaaaaaagcacaagcgaaccccagccctgattgccctgcgctaccagctacagcgtggggttgtggtcctgg

SEQ ID NO: 1038 - DNA, 368 bp, Homo sapien
ccagacgtggtggctcacacctgcaatcccagcaccttaggaggccgaggcaggaggatccttgaggtcaggagttcgagaccagcctcgccaacatggtgaaaccccatttctactaaaaatacaaaaaattagccaagtgtggtggcatatgcctgtaatcccaactactcagaaggccgaggcaggagaattacttgaacgcaggagaatcactgcagcccaggaggcagaggttgcagtgagccgagattgcaccactgcactccagcctgggtgacagagcaagactccatctcagtaaataaataaataaataaaaagcgctgcagtagctgtggcctcaccctgaagtcagcgggcccagg

SEQ ID NO: 1039 - DNA, 417 bp, Homo sapien
  misc_feature (1)...(417): n = A,T,C or G
ctgggcctatgctggtcatgaacggtcctggaaaatgactcccttccttcagtatctgcatcctcatgaagtcattcattttggagatcgtgtcttcacttttcttggtgaagaaactgctggatggagttgttggtggcatctgaggagtccgaagatggctctcagggaaggttgtgctggcctctgaaggatttggaagctgactctgttcctggggtagctnnatgctcttggggtcattgnttctcgggtttgnttttttctttatctggataaaactatgcatttctgaaatcagttttgacatctggttcttttttcctaagtcgaaagcagaaaagttggaagcttatctccttcttcacagggggatattgtggacattgnnctgtccccactacatccatttttcct

SEQ ID NO: 1040 - DNA, 409 bp, Homo sapien
ctgtccaatggcaacaggaccctcactccattcaatgtcacaagaaatgacgcaagagcctatgtatgtggaatccagaactcagtgagtgcaaaccgcagtgacccagtcaccctggatgtcctctatgggccggacacccccatcatttcccccccagactcgtcttacctttcgggagcgaacctcaacctctcctgccactcggcctctaacccatccccgcagtattcttggcgtatcaatgggataccgcagcaacacacacaagttctctttatcgccaaaatcacgccaaataataacgggacctatgcctgttttgtctctaacttggctactggccgcaataattccatagtcaagagcatcacagtctctgcatctggaacttctcctggtctctcag

SEQ ID NO: 1041 - DNA, 492 bp, Homo sapien
  misc_feature (1)...(492): n = A,T,C or G
cctcggctccacacctccgctgtgaccacagcctcaggtcaagctgtgctggggccatccaccttcctttgccatttagaagatggggcttggagcttggcaacacagaaattgacatcagccttataaaaccttggctgaacctaccgacctccaggagaatttcagccaaaacaaaaaagcaaatacacagagggaccctggaaccagaatccctccccatgggaaagacgaaggcacagagattcgagccaagtttcccaacatgttggtgtttgcagaaaagtccggtcacgtcacacacagcacagaggcaagaagcgaaggcagtggcattcacaggactactttatattaaagtttattacatttggaaaatctactgtacagggaaaaacccattggattaagtagagttttgccaaaagcaaaagactatcactctttggaaaatattcctgattccagcccanggcccagggtggggccaca

SEQ ID NO: 1042 - DNA, 125 bp, Homo sapien
cctggctctgatccagtgacccctctcaccaaagaactcggtttaaccagggctctgtaagaccactcccacccagagacttgtgtggcctggtgtggcctgtgtgtcggattccttcctgtcag

SEQ ID NO: 1043 - DNA, 459 bp, Homo sapien
ccagcctggagataagggtgaaggtggtgcccccggacttccaggtatagctggacctcgtggtagccctggtgagagaggtgaaactggccctccaggacctgctggtttccctggtgctcctggacagaatggtgaacctggtggtaagggagaaagaggggctccgggtgagaaaggtgaaggaggccctcctggagttgcaggaccccctggaggttctggacctgctggtcctcctggtccccaaggtgtcaaaggtgaacgtggcagtcctggtggacctggtgctgctggcttccctggtgctcgtggtcttcctggtcctcctggtagtaatggtaacccaggacccccaggtcccagcggttctccaggcaaggatgggcccccaggtcctgcgggtaacactggtgctcctggcagccctggagtgtctggaccaaaaggtgatgctgg

SEQ ID NO: 1044 - DNA, 368 bp, Homo sapien
cctgggcccgctgacttcagggtgaggccacagctactgcagcgctttttatttatttatttatttactgagatggagtcttgctctgtcacccaggctggagtgcagtggtgcaatctcggctcactgcaacctctgcctcctgggctgcagtgattctcctgcgttcaagtaattctcctgcctcggccttctgagtagttgggattacaggcatatgccaccacacttggctaattttttgtatttttagtagaaatggggtttcaccatgttggcgaggctggtctcgaactcctgacctcaaggatcctcctgcctcggcctcctaaggtgctgggattgcaggtgtgagccaccacgtctgg

SEQ ID NO: 1045 - DNA, 315 bp, Homo sapien
ccaatgggctttgctgtagcttgctgaaatcaccaagcaggagagatttaaccagaggcgatgtgtccagtcaccagcatagagccatcctctgtgtcaccatccacacgcagggcctcctggcagacctcatgcaatgccctccatgttaatattcatcagaaaatggataattaggggggccagcaaaaatatcaagggtcaaatatcgcacatttctgtttaggccatctatggctttcatctcctctgaagtcaactggaattcaaacacctgcacgttctgtctgatgcgctgctcattgtagctcttgg

SEQ ID NO: 1046 - DNA, 317 bp, Homo sapien
cctcgcctggagggccccgggcagcacagggaggacgagcttgtccagcagagggtctggcagagggtcccgcagaggtttgggcagggggtctgacatccctggctcctgctctggctctggctgccgggatttgcacaggcccaggtgcatacagatgccgtttgagtcaatctggttctggaagtagtcgatgaccagggggaagtagtcgtcaagcacttggttgcactggggcatgagcagcttcaaggggaggacgttgcactcctgctccaggaacttcctcaccgtgtcctggaaaatggcctccttgg

SEQ ID NO: 1047 - DNA, 412 bp, Homo sapien
  misc_feature (1)...(412): n = A,T,C or G
gtacaagctttttttttttttttttttttttttgtttaatgcttgaactttattttggagagagaaatttagaaagacacaaggtacacagagtaaaatgtttttcttttttcaggaccttgaactgaatcttgcactgctttggtttctatctaggaagctcagcgacagcagagtctgtanaggcggccactgatttcacacaccccggagagggactcacgggtagcacaacggccggttcggcaatagcaggtggctcttgcctganaacctgaggttctaanagcananagtccatttcctgcaaaggagatagcaaggtcctggttgtcttccccanactgcttctgggttgtagcctcatcagctctttcctggagtgactcagcctgggcctgcagggccacca

SEQ ID NO: 1048 - DNA, 476 bp, Homo sapien
  misc_feature (1)...(476): n = A,T,C or G
taaaaaaaggaaaaagttttattacgaaactagtttgtataaaacagggttatacatatttttgtaagtttgtaataaaacagtaagaaaaaaaggcagtaatagaaatctccaaaaggcaacctatcaaaaccaactggctgccactttgagtttggacagtagctgcataaactttgttcttcttgaacagtatttaataacatcattaatacattaacaacatttctataaagtaagacacattggtgctgaagtacaactggnggcctcttgatctcacctatgaggagagttctttacaaaaccacatagggaaaattgcagttgtaaggngaactacncatctaaaatatgcanaggtaatagcattacatgttaaaggtatcaagggnatatacacattttaaaccatttgnnacaaaacttntataaaatttntttctctctctttctctcttatgcacaaaaaatat

SEQ ID NO: 1049 - DNA, 274 bp, Homo sapien
cctggctgagcaggcagagcaccctgggaccccagggcagaaggacccctgccctccagtccccaagacccaggcccgtctccactcatacacgccacctacatgtgacgtcagccctgaaaaggtaacaggaaagttcagaacaaaaacaaaaccccaaaagtaaaaaggctacgtgtagcagagtaataccggaaacgttatatacacaggcggtgatggccccctcggaagtgtccgggtcacttagggggcactgcagaggtccctgtgg

SEQ ID NO: 1050 - DNA, 472 bp, Homo sapien
ctgcagcctgggactgaccgggaggctctgattatttacccaccacaggtaggttgtgttctgaatctcaggttcacaggttaaggctacagcatcctcatcctccacggggttggagttgttgctggtgatgaagggtttgggtggctctgcatagactgtgatcgtcgtgactgtggtcctattgaggccagtgtctgagttatgggcttggcacgtataggatccactattattcacagtgatgttggggataaagagctcttgggtggattgctggaaagtcccattgacaaaccaagagtactgtgcaggtgggttagaggctgcgtggcaggagaggttcagattttcccctgatctgtaagatgtgtttagaggggaaatggtgggggcatccgggccatagaggacattcaggatgactgaatcactgcgcctggcactcactgggttctgggtttcacatttg

SEQ ID NO: 1051 - DNA, 249 bp, Homo sapien
ccaccaaccgtggcatcacgcgaatccggggcaccagctaccagagccctcacggcatccccatagacctgctggaccggctgcttatcgtctccaccaccccctacagcgagaaagacacgaagcagatcctccgcatccggtgcgaggaagaagatgtggagatgagtgaggacgcctacacggtgctgacccgcatcgggctggagacgtcactgcgctacgccatccagctcatcacagacctgc

SEQ ID NO: 1052 - DNA, 289 bp, Homo sapien
ccaggaccacaaccccacgctgtagctggtagcgcagggcaatcagggctggggttcgcttgtgcttttttgccaaggcacaaaggactgggtcctccaagagcaccggggagttcgggtccacccatcgtttgtctcgttgagatcccagagcactataggcaaccagaacaatatctttcgacttgcagaaatctagcaatttactccggttgaaatacggatgacattctacctggttgcagacaggcttgtacttgagtcctggcttgttgaggatcatctccag

SEQ ID NO: 1053 - DNA, 199 bp, Homo sapien
ccacgactgcatgcccgcgcccgccaggtgatacctccgccggtgacccaggggctctgcgacacaaggagtctgcatgtctaagtgctagacatgctcagctttgtggatacgcggactttgttgctgcttgcagtaaccttatgcctagcaacatgccaatctttacaagaggaaaccgtaagaaagggcccagccg

SEQ ID NO: 1054 - DNA, 224 bp, Homo sapien
tcgaccctgtgaagcaggagacagatgctgcattttcactgttgtttgtcctctgtttttgtagcatccccgggaacttccccatcagccaggggcttgtccccaccacccttcacctggctttccagttggctgagacgctgcttcatcttcatctgggtggcgttgtactcagccaggaggcgtgcaaacctggtctgcagggcgtccagggaggaccccag

SEQ ID NO: 1055 - DNA, 390 bp, Homo sapien
cctcttattagggctctggtagcggcggcggcggacccttggggtctggacgcaacggcggcgggagcatgaacgcccctccagccttcgagtcgttcttgctcttcgagggcgagaagaagatcaccattaacaaggacaccaaggtacccaatgcctgtttattcaccatcaacaaagaagaccacacactgggaaacatcattaaatcacaactcctaaaagacccgcaagtgctatttgctggctacaaagtcccccaccccttggagcacaagatcatcatccgagtgcagaccacgccggactacagcccccaggaagcctttgccaacgccatcaccgacctcatcagtgagctgtccctgctggaggagcgctttcgggtgg

SEQ ID NO: 1056 - DNA, 450 bp, Homo sapien
  misc_feature (1)...(450): n = A,T,C or G
ccagcatcaccttttggtccnnacactccagggctgccaggagcaccagtgttacccgcaggacctgggggcccatccttgcctggagaaccgctgggacctgggggtcctgggttaccattactaccaggaggaccaggaagaccacgagcaccagggaagccagcagcaccaggtccaccaggactgccacgttcacctttgacaccttggggaccaggaggaccagnangtccagaacctccagggggtcctgcaactccaggagggcctccttcacctttctcacccggagcccctctttctcctttaccaccaggttcaccattctgtccaggagcaccagggaaaccagcaggtcctggagggccagtttnacctctctcaccanggctaccacgaggtccagctatacctggaagtccgggggcaccaccttcacccttacct

SEQ ID NO: 1057 - DNA, 337 bp, Homo sapien
tgagcggccgcccggcaggtcctcgcctggagggccccgggcagcacagggaggacgagcttgtccagcagagggtctggcagagggtcccgcagaggtttgggcagggggtctgacatccctggctcctgctctggctctggctgccgggatttgcacaggcccaggtgcatacagatgccgtttgagtcaatctggttctggaagtagtcgatgaccagggggaagtagtcgtcaagcacttggttgcactggggcatgagcagcttcaaggggaggacgttgcactcctgctccaggaacttcctcatcgtgtcctggaaaatggcctccttgg

SEQ ID NO: 1058 - DNA, 237 bp, Homo sapien
ctggggactgggaatgctagcatatggtatctcaagttggctctcagaactaaacggggataagggcctagaatggaagagggaaccagccagaccctcagtccttcctgtcctggactgggagccacagatgtccctgtgatctgtcactgccctgatctgggtcttcagccattaaagctcagtgtcatcttcagtcaccaacgggggtcttggtgtccttccaaacccctttgg

SEQ ID NO: 1059 - DNA, 210 bp, Homo sapien
  misc_feature (1)...(210): n = A,T,C or G
agcccatccccccggctccctcctagtctgccctgcgtcctctgtccccgggtttcagagacaacttcccaaagcacaaagcagtttttccccctaggggtgggaggaagcaaaagactctgtacctactttgtatgtgtataataatttgagatgtttttaattattnngattgctggaataaagcatgtggaaatgacccaaaaaaaa

SEQ ID NO: 1060 - DNA, 564 bp, Homo sapien
ctggccacagagcccagcaagtccttcctgggagagaagagttagggctgatactgaaggtctctttcacatctgggcacacgtctgccttcaggctgtaagaatttcatttgtcgattgttaaataaaaccaggagaaagcaatgcaggtctctgggaatctcatcccttccataaggaaaatgctctgccaattcaagtttcattcagtcaggaagacagaaggatttaaggcttcggtgacaattataatcctctgagaaattatttccccttaaagtcaagataagataatagtgtttactgtactttctcttgactcttgaaatccctggtattgggtgtaggcaacttgcacctgcaatgaagtccgcaggagaggaaggtctctcctcccccgaaagctatcccaggtcacatgcgtggcgaatgcccactgaacctcggctctcatggaagcaggaaagacaccgagattcaagccttctagtaggttgaggacgctgtgctcatggcatcttcggagattttggtactggcaggggtggatgcttgcaaaatact

SEQ ID NO: 1061 - DNA, 267 bp, Homo sapien
cctatggaggtgcctatgatgtcatgagctctaagcacctttgtggtgataccaactatgcctggcccaccgcagagattgcggtcatgggagcaaagggcgctgtggagatcatcttcaaagggcatgagaatgtggaagctgctcaggcagagtacatcgagaagtttgccaaccctttccctgcagcagtgcgagggtttgtggatgacatcatccaaccttcttccacacgtgcccgaatctgctgtgacctggatgtcttgg

SEQ ID NO: 1062 - DNA, 603 bp, Homo sapien
  misc_feature (1)...(603): n = A,T,C or G
ctggtcatcttgtcatgtgaagaccatcttcctacagagtctaggctggccgtcgttgaagtcctcaccagtactacaccacttttcctcaccaacccccatcctattcttgagttgcaggatacacttgctctctggaagtgtgtccttacccttctgcagagtgaggagcaagctgttagagatgcagccacggaaaccgtgacaactgccatgtcacaagaaaatacctgccagtcaacagagtttgccttctgccaggtggatgcctccatcgctctggccctggccctggccgtcctgtgtgatctgctccagcagtgggaccagttggcccctggactgcccatcctgctgggatggctgttgggagagagtgatgacctcgtggcctgtgtggagagcatgcatcaggtggaagaagactacctgtttgaaaaagcagaagtcaacttttgggccgagaccctgatctttgtgaaatacctctgcaagcacctcttctgtctcctctcaaaagtccggctggcgtnccccaagccctgagatgctctgtcaccttcaaaggatggtgtcagagcagtgccacctnctgtctcagtt

SEQ ID NO: 1063 - DNA, 222 bp, Homo sapien
ccatcgtggatcactgagatgcagtggcggtccccgtagctggcccgtggcatgccaccctggaagatggtgaagggcaacccctgcctagtggtcagccggaggattctggtaatcgctttgcaaggaaagggaccgtaaggcacgaggctgcggaggggctctggttgctgggcttcgctggacacgggccactggcagtagctgccgtcagagtgacag

SEQ ID NO: 1064 - DNA, 72 bp, Homo sapien
  misc_feature (1)...(72): n = A,T,C or G
gatgatcaatatnnactggaacacatgcatgcttttggaatgtataattacctgcactgtgattcatggtat

SEQ ID NO: 1065 - DNA, 251 bp, Homo sapien
gtggccgtgatggatagcgacaccacaggcaagctgggctttgaggaattcaagtacttgtggaacaacatcaaaaggtggcaggccatatacaaacagttcgacactgaccgatcagggaccatttgcagtagtgaactcccaggtgcctttgaggcagcagggttccacctgaatgagcatctctataacatgatcatccgacgctactcagatgaaagtgggaacatggattttgacaacttcatcag

SEQ ID NO: 1066 - DNA, 289 bp, Homo sapien
ctggagatgatcctcaacaagccagggctcaagtacaagcctgtctgcaaccaggtggaatgtcatccttacttcaaccagagaaaactgctggatttctgcaagtcaaaagacattgttctggttgcctatagtgctctgggatcccaccgagaagaaccatgggtggacccgaactccccagtgctcttggaggacccagtcctttgtgccttggcaaaaaagcacaagcgaaccccagccctgattgccctgcgctaccagctacagcgtggggttgtggtcctgg

SEQ ID NO: 1067 - DNA, 301 bp, Homo sapien
ctgtagttgactgaagtcgctaaacaggacggatttaagtagaggtgatatgtccagtcaccggcatagagacgtcctctgcgtcaccatccacacacagggcttctggtagacatcaggcaaagctctccatgttaatattcatctgaatatggataattagggtggctagcaaaactatcactgttaaaatagtggagatttctgtctaggccatctatggctttcatgtcctccgcagtcaactggaactcaaaaacctgcacgttctgtctgatgcgctgctcattgtagctcttgg

SEQ ID NO: 1068 - DNA, 255 bp, Homo sapien
ccagcagttcctctttgccttatatttgtggtacgcccggccagccttcaagatgggtttgtcaattcggccacctccagccaccacaccaaccacagctctgttggctgaggagataaccttcttggagccggagggcagcttcacacgggtcttcttggtctcagggttgtgggagataacggtggcatagttccctgatgcccgggccagcttgccacggtctccaggcttctcctccaggcagcacacgat

SEQ ID NO: 1069 - DNA, 77 bp, Homo sapien
ctggacaggctccagcaccggcccaaacacgcccagacctcggcaggcaccacctggttctcccacccagaaagttc

SEQ ID NO: 1070 - DNA, 163 bp, Homo sapien
  misc_feature (1)...(163): n = A,T,C or G
ctgctgggatgnctgccaagtttttcagccataaggtagcgaaatctagcagaatccagattacatccacttccaatcacgcggtgtttgggtaatccacctagtttnnaggtaacatacgtaagaatgtccactgngttggaaacnncaattatgatgcaat

SEQ ID NO: 1071 - DNA, 246 bp, Homo sapien
  misc_feature (1)...(246): n = A,T,C or G
ctgaccggaccggncatgcccgtccggaacgtctataagaaggagaaagctcgagtcatcactgaggaagagaagaatttcaaagccttcgctagtctccgtatggcccgtgccaacgcccggctcttcggcatacgggcaaaaagagccaaggaagccgcagaacaggatgttgaaaagaaaaaataaagccctcctggggacttggaatcagtcggcagacaaaaaaaaaaaaaaaaaaacaaa

SEQ ID NO: 1072 - DNA, 224 bp, Homo sapien
  misc_feature (1)...(224): n = A,T,C or G
ctgccctgacagagcgctccttgatgggcatggactggaaaggatcccaggaatacaagaaggcagaaaaaaaagtttggaagatctttaaatctgacagtgaagtggctggttacatccggcaagcgggtgacttccatcangtaattattcgaggtggaggacatattttaccctatgaccagcctctgagagcttttgacatgattaatcgattcatttat

SEQ ID NO: 1073 - DNA, 301 bp, Homo sapien
ctgtagttgactgaagtcgctaaacaggacggatttaagtagaggtgatatgtccagtcaccggcatagagacgtcctctgcgtcaccatccacacacagggcttctggtagacatcaggcaaagctctccatgttaatattcatctgaatatggataattagggtggctagcaaaactatcactgttaaaatagtggagatttctgtctaggccatctatggctttcatgtcctctgcagtcaactggaactcaaaaacctgcacgttctgtctgatgcgctgctcattgtagctcttgg

SEQ ID NO: 1074 - DNA, 132 bp, Homo sapien
  misc_feature (1)...(132): n = A,T,C or G
caagctttttttttttttttttttttttttttcgctcaaanactttnttttattantacatgggctggnattgatggnaagggacaaatgtanttggcaaccatggttagcatcggatgcccatcccaatgg

SEQ ID NO: 1075 - DNA, 301 bp, Homo sapien; identical to SEQ ID NO: 1073

SEQ ID NO: 1076 - DNA, 436 bp, Homo sapien
ctgctgggatgaatgccaagtttttcagccataaggtagcgaaatctagcagaatccagattacatccacttccaatcacgcggtgtttgggtaatccacctagtttccaggtaacatacgtaagaatgtccactgggttggaaaccacaattatgatgcaatcaggactgtacttgacgatctgaggaataatgaatttgaagacattaacatttctctgcaccagattgagccgactctccccttcttgctgacggactcctgcagttactactacaatcttagaattggcggtcacagaataatctttatctgccacaattttaggtgtctgaagaaataagctcccatgctgcagatccatcatttctcctttaagcttatcttccaaaacatccacaagagcaagttcatcagccagagactttcccagaa

SEQ ID NO: 1077 - DNA, 256 bp, Homo sapien
ctgaagattaataggaaacagtgaaaaagcaacgtcctgtgatcagtaactttaaagacaagcttggttctctctttctggcactactgacattcccaccattctagcttccgaattctggaaaaagagaagatgattaacaaaaatagagaatgtagaaacttctggttttgtgcctacaggattggcaccagaccctcagtgctcacttgctccatctacaaggcagcacccctcccagaggcagccagggagg

SEQ ID NO: 1078 - DNA, 202 bp, Homo sapien
  misc_feature (1)...(202): n = A,T,C or G
ctgtgctncncaaccagatccatgtnaagtgccccgcccagagaagggagccagggggagctgactncagncaacanccagtgnccggatgancaccaacatgtgaggggtgaaccttggcctccangacatntgcaccccctncccacctccacggacctcggacctccaggcggctcagtgctgcctgcggcccagctaa

SEQ ID NO: 1079 - DNA, 170 bp, Homo sapien
gcgcttctcgggcaccgtcaggcttaagtccactccccgccctaagttctctgtgtgtgtcctgggggaccagcagcactgtgacgaggctaaggccgtggatatcccccacatggacatcgaggcgctgaaaaaactcaacaagaataaaaaactggtcaagaagctgg

SEQ ID NO: 1080 - DNA, 494 bp, Homo sapien
cctgcggcaaagagatgcgcttattgagaaacatggcttagttataatccccgatggcactcccaatggtgatgtcagtcatgaaccagtggctggagccatcactgttgtgtctcaggaagctgctcaggtcttggagtcagcaggagaagggccattagatgtaaggctacgaaaacttgctggagagaaggaagaactactgtcacagattagaaaactgaagcttcagttagaggaggaacgacagaaatgctccaggaatgatggcacagtgggtgacctggcaggactgcagaatggctcagacttgcagttcatcgaaatgcagagagatgccaatagacaaattagcgaatacaaatttaagctttcaaaagcagaacaggatataactaccttggagcaaagtattagccggcttgagggacaggttctgagatataaaactgctgctgagaatgctgaggaaagttgaagatgaattgaaagca

SEQ ID NO: 1081 - DNA, 123 bp, Homo sapien
ctgctgctattaagttgcaagctctacagctagctacatgactgatggatcagtttgagatttgttcccttgtcaaaagtttaactctgatagaaggttggcctcacattctgatgtttggac

SEQ ID NO: 1082 - DNA, 297 bp, Homo sapien; identical to SEQ ID NO: 389

SEQ ID NO: 1083 - DNA, 452 bp, Homo sapien
ctgggccacgaggacaccaccagcttggatcggcctcgccgtgtggaatactttgtagataagcaactccaagtaaaggctgtcacctgtgggccgtggaacacctacgtgtatgctgtggagaaagggaagagctgacatgtgtacgtatatgtatatgcaacacctgtgagacccccattcaggtcaaggaaaaccattgcctgcaccccaagggccccatatttgcccctccccatcacagtcctgcccttcaccctcaagcacggtcctaaacttgtctgcactttagaaacacctggagagcattgaaaactctgctgcctaaggtcagcatcaatcaaaacaatgaaatcaatgaaacaatgaaaccagagcttctaggtgtgtggcctggatagtggtagattcaaagctccacccacctcatcccaggtacatttgatgtgcag

SEQ ID NO: 1084 - DNA, 301 bp, Homo sapien
ctgtagttgactgaagtcgctaaacaggacggatttaagtagaggtgatatgtccagtcaccggcatagagacgtcctctgcgtcaccatccacacacagggcttctggtagacatcgggcaaagctctccatgttaatattcatctgaatatggataattagggtggctagcaaaactatcactgttaaaatagtggagatttctgtctaggccatctatggctttcatgtcctctgcagtcaactggaactcaaaaacctgcacgttctgtctgatgcgctgctcattgtagctcttgg

SEQ ID NO: 1085 - DNA, 369 bp, Homo sapien
ctgtttcccatgggccaccaggcggctcaggacagcaaacgtctcatcccctctcaggatgtacttctccatgtcctgctcgatccactggtacatgaggcccttcacatgcacgtctcggatggcgtccgtcacgtccttgtagagatgtgcttggtcaaactccaggctgtggcccagaaagtagtccaccacacaggacagcagagccatctccggtagcgagaagatgtccatgaactgcttaatggagggacccttgccatagaagccactcatctggtatagtgggatgtgctgggtacccccatacagctcaatcacctcctcgtctggcacaggctggaggcccctgtaggctgtccccag

SEQ ID NO: 1086 - DNA, 316 bp, Homo sapien
cctcagaggtttctccacagtcctcttctgggcaaattcttgtttcttcacatgccggactagcttaagaccaatgcagtagcttatttccaagccttgcaaagtatataatatctaagaggaaaggttttgtcatcccagcgttgtccactttgtggggctttgtaggtagacggagccacactacaggcagggtatgagcagagggatgtatggagtgtgggtgactctgagcctcactgccgctgcaaggtggggaaactgtaagtgaacccctgtgggtgcgggggagggtatccggtgcgcagggaggtgg

SEQ ID NO: 1087 - DNA, 329 bp, Homo sapien
cctgcaggggatgggaccttccagaagtgggcgtctgtggtggtgccttctggacaggagcagagatacacctgccatgtgcagcatgagggtctgcccaagcccctcaccctgagatgggagccgtcttcccagcccaccatccccatcgtgggcatcattgctggcctggttctctttggagctgtgatcgctggagctgtggtcgctgctgtgatgtggaggaggaagagctcagatagaaaaggagggagctactctcaggctgcaagcagtgacagtgcccagggctctgatatgtctcccacagcttgtaaagtgtgagacag

SEQ ID NO: 1088 - DNA, 342 bp, Homo sapien
ccactcactgctgggacccaggcacctcccttctccatcctctctggattgtcagtaatgtcctggaacagaagcctgtgggatggccttgggcacggagaagccctggggtcagtgtcgtgcacggatggcggcagtgttgaacccaggaggctgaacccggcccaccacggaagatgagtgcatggcaaccgcctgccttcacgtcgctccacttggtaaccccaaggtctgggctgttctaggtattgcttcacgtgccccagcaagcccttaacaagagggcctggttccctgaagaaccaatcccaggaaggggccttgatccctccgccttgctga

SEQ ID NO: 1089 - DNA, 51 bp, Homo sapien
  misc_feature (1)...(51): n = A,T,C or G
ccttgtgttcagtctccncgctcttcttgccactgttgagggtggagatgt

SEQ ID NO: 1090 - DNA, 515 bp, Homo sapien
cctggggaggccctaggggagcaccgtgatggagaggacagagcaggggctccagcaccttctttctggactggcgttcacctccctgctcagtgcttgggctccacgggcaggggtcagagcactccctaatttatgtgctatataaatacgtcagatgtacatagagatctattttttctaaaacattcccctccccactcctctcccacagagtgctggactgttccaggccctccagtgggctgatgctgggacccttaggatggggctcccagctcctttctcctgtgaatggaggcagagacctccaataaagtgccttctgggctttttctaacctttgtcttagctacctgtgtactgaaatttgggcctttggatcgaatatggtcaagaggttggaggggaggaaaatgaaggtctaccaggctgagggtgagggcaaaggctgacgaagagggaaagttacagatttcctgtagcaggtgtgggcttacagacacatggactgg

SEQ ID NO: 1091 - DNA, 277 bp, Homo sapien
gcgtcccggagcccacggtggtcatggctgccagagcgctctgcatgctggggctggtcctggccttgctgtcctccagctctgctgaggagtacgtgggcctgtctgcaaaccagtgtgccgtgccagccaaggacagggtggactgcggctacccccatgtcacccccaaggagtgcaacaaccggggctgctgctttgactccaggatccctggagtgccttggtgtttcaagcccctgcaggaagcagaatgcaccttctgaggcacctccag

SEQ ID NO: 1092 - DNA, 368 bp, Homo sapien; identical to SEQ ID NO: 1044

SEQ ID NO: 1093 - DNA, 459 bp, Homo sapien
ctgtgcatggagccatttggatggcggcgggcggggggggattctctgtatcaggagtgactttgttgccccacacagcctcctgctgcaggtgctttggaaagagatgctgccttggagctggtgaatctgtggaccacattcaagggtgtggcacaggcatcttcccatccttttcactccgaatcgctggcgacacattctcctttccagctaggaaagggttcctcgcggctggtttagattgtggttgtttgttttgcttctactaagactgttttgtttcaaaaaggaaacaagttttgtgtttgctgtctacgctggagtcctgaactgtgggtagaaaacacgacctggctttgtagaaaggacacagggctgttttatgaactaagcggtgaggctcaggtggcggctctcacagagcccctgatgctgttgttctttgagggcttaagg

SEQ ID NO: 1094 - DNA, 610 bp, Homo sapien
  misc_feature (1)...(610): n = A,T,C or G
ccatgcaaaaggaggtggtgcactcagtgcagtcgctgccacaaaaagtccgattattttcattggtacaggggaacatatagatgactttgaacctttcaaaacacagccttttattagcaaacttcttggtatgggcgacattgaaggactgatagataaagtcaacgagttgaagttggatgacaatgaagcacttatagagaagttgaaacatggtcagtttacgttgcgagacatgtatgagcaatttcaaaatatcatgaaaatgggccccttcagtcagatcttggggatgatccctggttttgggacagattttatgagcaaaggaaatgaacaggagtcaatggcaaggctaaagaaattaatgacaataatggatagtatgaatgatcaagaactagacagtacggatggtgccaaagtttttagtaaacaaccaggaagaatccaaagagtagcaagaggatcgggtgtatcaacaagagatgttcgagaacttttgacacaatataccaagtttgcacagatggtaaaaaagatgggaggtatcaaaggacttttcaaaggtgggcgacatgtctaanaatgtgagccagtcacagat

SEQ ID NO: 1095 - DNA, 232 bp, Homo sapien
ccttatttctcttgtcctttcgtacagggaggaatttgaagtagatagaaaccgacctggattactccggtctgaactcagatcacgtaggactttaatcgttgaacaaacgaacctttaatagcggctgcaccatcgggatgtcctgatccaacatcgaggtcgtaaaccctattgttgatatggactctagaataggattgcgctgttatccctagggtaacttgttccg

SEQ ID NO: 1096 - DNA, 377 bp, Homo sapien
ccacgctcatggaaaccacccaaggacagccagagtccacattccctggcaagctgggtgtattcttccaaaagtttcccacccagtggttcagacaggtgtagcgtctctgcagggtcccgtgcaatgaagtcaaatgcctcaggcaggaaagccaggcaggcacccagtctggcagcctctcgaaccagcccagcacatgttttaaagttctgttgcttgtctggcgtcgatgttacctggcacacagccaccaggggcagttcgcaggaggaagaggagatagccatggctctgggcctgggctgagcacaaagtactgagagttgaggtatccggagtccaggacacagaagggacaggaatctgtgaggagg

SEQ ID NO: 1097 - DNA, 311 bp, Homo sapien
ccacgccatggggctggagcactcccaagaccctggggccctgatggcacccatttacacctacaccaagaacttccgtctgtcccaggatgacatcaagggcattcaggagctctatggggcctctcctgacattgaccttggcaccggccccacccccacactgggccctgtcactcctgagatctgcaaacaggacattgtatttgatggcatcgctcagatccgtggtgagatcttcttcttcaaggaccggttcatttggcggactgtgacgccacgtgacaagcccatggggcccctgctggtgg

SEQ ID NO: 1098 - DNA, 404 bp, Homo sapien
ccacccacgcttaggttcccatcacactgatgactccgggtttggcgagcacaggagcgcaaaccttttcacattctttctgtgatccaaatttgttttcgtttccaccacaacctccataccagaatcttgcacagcttttggtgtttggatcatagtaccattttaatatgaaatccctgcaagttccttcgtctttcggcaacttgcatatatctgtttcagtgagagccaatggttctgtgctcaccattagattgatggttgaactagaagctgaccttgctggctgtggaggtgggggctgagatttctttgtactgaaacttccgtggtaggtggctctgacctgagacctcaggtagcagaccacagccacatggtatgtctgcccagcgagcagg

SEQ ID NO: 1099 - DNA, 442 bp, Homo sapien
ccatgggatggctcttctgaccattgggggccaggccaggccaggccaggcttagggtagcaaggaccaggccaaaggggcagggcctcctttggaggggttgaggggtacatcctcggctggtgtttgcatccaggggtccagcaggatctcttccagtgagggtcgggaagaaggtttgggggccaggcaccggcggattagggcacagcagtctggggagacatgggctgggaagtggagctcagcttccagaatctcctggtccctctcaaagggaatgtccccacacaccatgtcatagaggaggatgcccagtgaccagacagtggccgggagtgcatggtactggtgtcgagagatccactctggggggctgtacacccttgtcccatcaaagtcagtgtagggttcatcatgaagcagggcaccaggaaccaaa

SEQ ID NO: 1100 - DNA, 191 bp, Homo sapien
ccacgaaaatcaatgagaagccacaggtgatcgcggactatgagagcggacgggccatacccaataaccaggtgcttggcaaaatcgagcgggccattggcctcaagctccggggaaaggacattggaaagcccatcgagaaggggcctagggcgaaatgaacacaaagcctcgaaatcagtgcgctccag

SEQ ID NO: 1101 - DNA, 178 bp, Homo sapien
cgggtactttggtggacatgaaggaactgggcatatgggagccattggctgtgaagctgcagacttataagacagcagtggagacggcagttctgctactgcgaattgatgacatcgtttcaggccacaaaaagaaaggcgatgaccagagccggcaaggcggggctcctgatgctgg

SEQ ID NO: 1102 - DNA, 209 bp, Homo sapien
agccaggctagtgacagaaatggattcgaaatatcagtgtgtgaagctgaatgatggtcacttcatgcctgtcctgggatttggcacctatgcgcctgcagaggttcctaaaagtaaagctttagaggccaccaaattggcaattgaagctggcttccgccatattgattctgctcatttatacaataatgaggagcaggttggactgg

SEQ ID NO: 1103 - DNA, 396 bp, Homo sapien
  misc_feature (1)...(396): n = A,T,C or G
ctatagggctcgagggccgcccgggcaggtggtgcctctaatactggtgatgctagaggtgatgtttttggtaaacaggcggggtaagatttgccgagttccttttactttttttaacctttccttatgagcatgcctgtgttgggttgacagtgggggtaataatgacttgttggttgattgtagatattgggctgttaattgtcagttcagcgttttaatctgacgcaggcttatgcagaggagaatgttttcatgttacttatactaacattagttcttctatagggtgatagattggtccaattgggtgtgaggagttcagttatatgtttgggattttttaggtantgggtgttgagcttgaacgctttcttaattggtggctgctttagg

SEQ ID NO: 1104 - DNA, 342 bp, Homo sapien
  misc_feature (1)...(342): n = A,T,C or G
ctgctgatacccaggcagtagctgatgctgtcacctaccagctcggtttccacagcattgaactgaatgagcctccactggtccacacagcagccagcctctttaaggagatgtgttaccgataccgggaagacctgatggcgggaatcatcatcgcaggctgggaccctcaagaaggagggcaggtgtactcagtgcctatggggggtatgatggtaaggcantnctttgccattggaggctccgggagctcctacatctatggctatgttgatgctacctaccgggaaggcatgaccaangaagagtgtctgcaattcactgccaatgctctcgctttgg

SEQ ID NO: 1105 - DNA, 551 bp, Homo sapien
ctggggccactgtcggcatcatgattggagtgctggttggggttgctctgatatagcagccctggtgtagtttcttcatttcaggaagactgacagttgttttgcttcttccttaaagcatttgcaacagctacagtctaaaattgcttctttaccaaggatatttacggaaaagactctgaccagagatcgagaccatcctagccaacatcgtgaaaccccatctctactaaaaatacagaaattagctggacatggtggcatgtgcctgtaatcccagctactcaggaggctgaggcaggagaactgcttgaacagggacccgggaggcggagattggagtgagccgagatcgcgccactgcactccagtctgggctacacagtgagactctgtctcaagaaaaataaacagaagaattgggggttgggggtgggaaacagtgtttccaggcagagagaacagcacgtacaaaggagactgttgggagggttaaatgaaataattcatgtaaggtacttagtaccacacatgaatttcacaagcagcag

SEQ ID NO: 1106 - DNA, 280 bp, Homo sapien
ctgctcttcacacagggttctggggaaaacaaggaagagatcatcaattatgaatttgacaccaaggacctggtgtgcctgggcctgagcagcatcgttggcgtctggtacctgctgaggaagcactggattgccaacaacctttttggcctggccttctcccttaatggagtagggctcctgcacctcaacaatgtcagcactggctgcatcctgctgggcggactcttcatctacgatgtcttctgggtatttggcaccaatgtgatggtgacagtgg

SEQ ID NO: 1107 - DNA, 570 bp, Homo sapien
ctgattagtgtctaaggaatggtccaatactgttgcccttttccttgactattacactgcctggaggatagcagagaagcctgtctgtacttcattcaaaaagccaaaatagagagtatacagtcctagagaattcctctatttgttcagatctcatagatgacccccaggtattgtcttttgacatccagcagtccaaggtattgagacatattactggaagtaagaaatattactataattgagaactacagcttttaagattgtacttttatcttaaaagggtggtagttttccctaaaatacttattatgtaagggtcattagacaaatgtcttgaagtagacatggaatttatgaatggttctttatcatttctcttccccctttttggcatcctggcttgcctccagttttaggtcctttagtttgcttctgtaagcaacgggaacacctgctgagggggctctttccctcatgtatacttcaagtaagatcaagaatcttttgtgaaattatagaaatttactatgtaaatgcttgatggaattttttcctgctagtgtagct

SEQ ID NO: 1108 - DNA, 386 bp, Homo sapien
ctgttcctgcggtgacactgtataaacacgatgaccctgccttgactttagttgctggtcttacatcaaataagcccacagacaaactccgtgccctgcctctgtggttatctttacaatacttgggacttgatgggtttgtggagaggatcaagcatgcctgtcaactgagtcaacggttgcaggaaagtttgaagaaagtgaattacatcaaaatcttggtggaagatgagctcagctccccagtggtggtgttcagatttttccaggaattaccaggctcagatccggtgtttaaagccgtcccagtgcccaacatgacaccttcaggagtcggccgggagaggcactcgtgtgacgcgctgaatcgctggctgggagaacag

SEQ ID NO: 1109 - DNA, 409 bp, Homo sapien
ctctggtctgtaaccagtctcttcaaggcattatctcctggggccaggatccgtgtgcgatcacccgaaagcctggtgtctacacgaaagtctgcaaatatgtggactggatccaggagacgatgaagaacaattagactggacccacccaccacagcccatcaccctccatttccacttggtgtttggttcctgttcactctgttaataagaaaccctaagccaagaccctctacgaacattctttgggcctcctggactacaggagatgctgtcacttaataatcaacctggggttcgaaatcagtgagacctggattcaaattctgccttgaaatattgtgactctgggaatgacaacacctggtttgttctctgttgtatccccagccccaaagacagctcctgg

SEQ ID NO: 1110 - DNA, 215 bp, Homo sapien; identical to SEQ ID NO: 890

SEQ ID NO: 1111 - DNA, 308 bp, Homo sapien
cctgggcccgctgacttcagggtgaggccacagctactgcagcgctttttatttatttatttatttactgagatggagtcttgctctgtcacccaggctggagtgcagtggtgcaatctcggctcactgcaacctctgcctcctgggctgcagtgattctcctgcgttcaagtaattctcctgcctcggccttctgagtagttgggattacaggcatatgccaccacacttggctaattttttgtatttttagtagaaatggggtttcaccatgttggcgaggctggtctcgaactcctgacctcaag

SEQ ID NO: 1112 - DNA, 177 bp, Homo sapien
ccactggctccctgggccagggcctcggggccgcttgtgggatggcctacaccggcaaatacttcgacaaggccagctaccgagtctattgcttgctgggagacggggagctgtcagagggctctgtatgggaggccatggccttcgccagcatctataagctggacaaccttgtgg

SEQ ID NO: 1113 - DNA, 646 bp, Homo sapien
  misc_feature (1)...(646): n = A,T,C or G
ccccaccatggacacactttgctacacactcctgctgctgaccaccccttcctgggtcttgtcccaggtcaccttgaaggagtctggtcctgtactggtgaaacccacagagaccctcacgctgacctgcaccgtctctgggttttcactcagtaatattagagtgggtgtgagttggatccgtcagcccccagggaaggccctggagtggtttgcatacattttttcgactgacgaaaaatccttcaattcatctctgaagaacaggctcaccatctccaaggacacctctaaaagccaggtggtccttagcatgaccaacatggaccctgtggacacagccacatattactgtgcacggctctctatttacttcggggagttagaaacctaccaatacatggacgtctggggcaaagggaccaccgccaccgtctcctcagcatccccgaccagccccaaggtcttcccgctgagcctctgcagcacccagccagatgggaacgtggtcatcgcctgcctggtccanggcttcttcccccaggagccactcagtgtgacctggagcgaaagcggacanggcgtgaccgccagaaacttccccacccagccaggatgcctncggggacctgtacaccacgagcag

SEQ ID NO: 1114 - DNA, 420 bp, Homo sapien
tgttgttttactcacctaacccttagaaaatgaatgttagaaggtgcctgccgaggcgggacagagtgttcgctcgcgctggagaaggctctgctcagccctgagagtcccttcctgccccaccgatactggcactttaaaaaggaagctgaccgcacagtgtccagacgaattggcccccagaagatggggagttctgtcctgcccttctgtgtctgcgtgacctcacccagcctaggagggaggtgcattcagggtagatttgcctctcattcaaagttctggggctttgggtggaaaacagccagctttggcgctgttggggagactcctccagaccaggaaccccagaaggagacagagcctgccacatcctcccacgccaggccctgggccagggtgattggactgagaatttgg

SEQ ID NO: 1115 - DNA, 416 bp, Homo sapien
ctgaaagtttctaaaatagaaacctggtgcatatggccccaaaacaccacatgctttgattacactcagggagcatgagttgcctatttgggtgagaaaatcccatgttacagtgcgatcgctgggcacgttttggagtaattccagccactgctatgtaagtgtttttaattcaggggtgtcttctacgttttcatcttctgaatatcttgtgacggtgcaggtttgagcaaaactggcatgaaatgagagctgttttagatgaagattgcaagatggatggcttggcccacagtggcagtgggttgggggtggaatgtggacaattaggaaaaaggcatgtcattctatctggctcctggagaggcagatagtcctgggggctttggtgtcacagttcccaaaagcaaggttgg

SEQ ID NO: 1116 - DNA, 382 bp, Homo sapien
ccttatttctcttgtcctttcgtacagggaggaatttgaagtagatagaaaccgacctggattactccggtctgaactcagatcacgtaggactttaatcgttgaacaaacgaacctttaatagcggctgcaccatcgggatgtcctgatccaacatcgaggtcgtaaaccctattgttgatatggactctagaataggattgcgctgttatccctagggtaacttgttccgttggtcaagttattggatcaattgagtatagtagttcgctttgactggtgaagtcttagcatgtactgctcggaggttgggttctgctccgaggtcgccccaaccgaaaatttttaatgcaggcttggtagtttaggacctgtgggtttg

SEQ ID NO: 1117 - DNA, 370 bp, Homo sapien
ctgcgtgtctgaaaaccaaagatttaaaacatagtaattattgaacctcagaagaaaaactcagattgaaagagcttagaataagaccctttttgagttgagaaaggtgagtacttagatttttcatttgctttgtttgggattacttacatcagtattttatgttgatcagaaagaaaggattcaattagctattgttcggttaataaaaatgtcagccactgtaggagtaagttggatgtccagcctttttagattgcttaacttggaaacactggactgggagcggtggctcatgcctgtgatcccagcactctgggaggccaaggcaggcagatcactggaggtcaggagtttgagaccaacctgg

SEQ ID NO: 1118 - DNA, 494 bp, Homo sapien
ctgtctcttacttttaaccagtgaaattgacctgcccgtgaagaggcgggcataacacagcaagacgagaagaccctatggagctttaatttattaatgcaaacagtacctgacaaacccacaggtcctaaactaccagacctgcattaaaaatttcggttggggcgacctcggagcagaacccaacctccgagcagtacatgctaagacttcaccagtcaaagcgaactactatactcaattgatccaataacttgaccaacggaacaagttaccctagggataacagcgcaatcctattctagagtccatatcaacaatagggtttacgacctcgatgttggatcaggacatcccgatggtgcagccgctattaaaggttcgtttgttcaacgattaaagtcctacgtgatctgagttcagaccggagtaatccaggtcggtttctatctacttcaaattcctccctgtacgaaaggacaagagaaataagg

SEQ ID NO: 1119 - DNA, 407 bp, Homo sapien
ccttatgactacaacggcccacgagaaaaatatggaatcgttgattacatgatcgagcagtccgggcctccctccaaggagattctgaccctgaagcaggtccaggagttcctgaaggatggagacgatgtcatcatcatcggggtctttaagggggagagtgacccagcctaccagcaataccaggatgccgctaacaacctgagagaagattacaaatttcaccacactttcagcacagaaatagcaaagttcttgaaagtctcccaggggcagtcggttgtaatgcagcctgagaaattccagtccaagtatgagccccggagccacatgatggacgtccagggctccacccaggactcggccatcaaggacttcgtgctgaagtacgccctgcccctggttgg

SEQ ID NO: 1120 - DNA, 548 bp, Homo sapien
  misc_feature (1)...(548): n = A,T,C or G
ccccagaggacccgttggacccagtggacctcctggcaaagatggaaccagtggacatccaggtcccattggaccaccagggcctcgaggtaacagaggtgaaagaggatctgagggctccccaggccacccagggcaaccaggccctcctggacctcctggtgcccctggtccttgctgtggtggtgttggagccgctgccattgctgggattggaggtgaaaaagctggcggttttgccccgtattatggagatgaaccaatggatttcaaaatcaacaccgatgagattatggcttcactcaagtctgttaatggacaaatagaaagcctcattagtcctgatggttctcgtaaaaacccagctagaaactgcagagacctgaaattctgccatcctgaactcaagagtggagaatactgggttgaccctaaccaaggatgcaaattggatgctatcaaggtattctgtaatatggaaactggggaaacatgcataagtgccaatccttngaatgttccacggaaacactggtggacagattcta

SEQ ID NO: 1121 - DNA, 278 bp, Homo sapien
cggccgaggtccgccatggcgtgtgctcgcccactgatatcggtgtactccgaaaagggggagtcatctggcaaaaatgtcactttgcctgctgtattcaaggctcctattcgaccagatattgtgaactttgtttacaccaacttgcgcaaaaacaacagacagccctatgctgtcagtgaattagcaggtcatcagactagtgctgagtcttggggtactggcagagctgtggctcgaattcccagagttcgaggtggtgggactcaccgctctgg

SEQ ID NO: 1122 - DNA, 591 bp, Homo sapien
ctgcagcggcagaggcagcatccagcggcggcgccagcagttccagtccgttgctttactttttgcttcaccgacatagtcattatgccgaagagaaagtctccagagaatacagagggcaaagatggatccaaagtaactaaacaggagcccacaagacggtctgccagattgtcagcgaaacctgctccaccaaaacctgaacccaaaccaagaaaaacatctgctaagaaagaacctggagcaaagattagcagaggtgctaaagggaagaaggaggaaaagcaggaagctggaaaggaaggcacagaaaactgaatctgtagataacgagggagaatgaattgtcatgaaaaattggggttgattttatgtatctcttgggacaacttttaaaagctatttttaccaagtattttgtaaatgctaattttttaggactctactagttggcatacgaaaatatataaggatggacattttatcgtctcatagtcatgctttttggaaatttacatcatcctcaagtaaaataaatatcagttaaatattggaagctgtgtgtaagattgattcagcattccatgcact

SEQ ID NO: 1123 - DNA, 454 bp, Homo sapien
ccaattgaaacaaacagttctgagaccgttcttccactactgattaagagtggggtggcaggtattagggataatattcatttagccttctgagctttctgggcagacttggtgaccttgccagctccagcagccttcttgtccactgctttgatgacacccaccgcaactgtctgtctcatatcacgaacagcaaagcgacccaaaggtggatagtctgagaagctctcaacacacatgggcttgccaggaaccatatcaacaatggcagcatcaccagacttcaagaatttagggccatcttccagctttttaccagaacggcgatcaatcttttccttcagctcagcaaacttgcatgcaatgtgagccgtgtggcaatccaatacaggggcatagccggcgcttatttggcctggatggttcaggataatcacctgagcagtgaagccag

SEQ ID NO: 1124 - DNA, 219 bp, Homo sapien
cctgctccagagcacggctgaccatttctgctccgggatctcagctcccgttccccaagcacactcctagctgctccagtctcagcctgggcagcttccccctgccttttgcacgtttgcatccccagcatttcctgagttataaggccacaggagtggatagctgttttcacctaaaggaaaagcccacccgaatcttgtagaaatattcaaactaat

SEQ ID NO: 1125 - DNA, 246 bp, Homo sapien
ccagagctgggcccaagctgcgctggaatcgcagcaggagaggggagtgggctggttcttcccaccacttcccaggctctgacagccgagactcatttccaaggcacagcagctttctaaagggactgagtttggactgggttttggacctccaggggctggagcttcatcacctgggcagtgtcttttctcagagagcaggtttctttatagtttggaaataaatggttcacggttcaaaagaaa

SEQ ID NO: 1126 - DNA, 227 bp, Homo sapien
ccattgttcccgtgcatcgaagcttgcaggcagcttcaggtcctcggtaaacataactctctggggtggcttgggcccacccaggaaggtaccacatagcctcttcaagtagctcatgtccacgttgtagaagttgtggccggcctgccacgtggtattccgtttgttgacatagttgaccagctcatccgacaggggatggaaagagggcctgctccgggcattgg

SEQ ID NO: 1127 - DNA, 377 bp, Homo sapien
cctgccgtcgatgccagggaggccgacaggaccttcttttccagcggggccgatatttccaggggaaccaggaagacctctgggtcccatgagaccaggctccccagggcgaccagcatctccattaggtcctcggactccagcagggccacttgcaccacgactaccaggagggcccatgacgccagctctgccatcagctccaggaagaccacgagaaccaggactacctctcagcccaggaggtcctggagggccggcagatccagcttccccattagggcctctctttccttcttcaccactgggaccaggaggaccttggggcccagcagagccgggctcacccttgttaccgctctctcctttggagccag

SEQ ID NO: 1128 - DNA, 253 bp, Homo sapien
gagagctattgctttgttaagatataaaaaggggtttctttttgtctttctgtaaggtggacttccagcttttgattgaaagtcctagggtgattctatttctgctgtgatttatctgctgaaagctcagctggggttgtgcaagctagggacccattcctgtgtaatacaatgtctgcaccaatgctaataaagtcctattctcttttatgagaaagaaaaagacactgtcctttaaagtgctgcagtatgg

SEQ ID NO: 1129 - DNA, 314 bp, Homo sapien
ccaagagctacaatgagcagcgcatcagacagaacgtgcaggtgtttgaattccagttgacttcagaggagatgaaagccatagatggcctaaacagaaatgtgcgatatttgacccttgatatttttgctggccccccaattatccattttctgatgaatattaacatggagggcattgcatgaggtctaccagaaggccctgcgtgtggatggtgacacagaggatggctctatgctggtgactggacacatcgcctctggttaaatctctcctgcttggtgatttcagcaagctacagcaaagcccattgg

SEQ ID NO: 1130 - DNA, 239 bp, Homo sapien
ccagtccaacctgctcctcattattgtataaatgagcagaatcaatatggcggaagtcagcttcaattgccaatttggtggcctctaaagctttacttttaggaacctctgcaggcgcataggtgccaaatcccaggacaggcatgaagtgaccatcattcagcttcacacactgatatttcgaatccatttctgtcactagcctggctagcaaatgtttcttcctccctcacaggcta

SEQ ID NO: 1131 - DNA, 402 bp, Homo sapien
aaggagtcctgcttatcacaatgaatgttctcctgggcagcgttgtgatctttgccaccttcgtgactttatgcaatgcatcatgctatttcatacctaatgagggagttccaggagattcaaccaggaaatgcatggatctcaaaggaaacaaacacccaataaactcggagtggcagactgacaactgtgagacatgcacttgctacgaaacagaaatttcatgttgcacccttgtttctacacctgtgggttatgacaaagacaactgccaaagaatcttcaagaaggaggactgcaagtatatcgtggtggagaagaaggacccaaaaaagacctgttctgtcagtgaatggataatctaatgtgcttctagtaggcacagggctcccaggccaggac

SEQ ID NO: 1132 - DNA, 304 bp, Homo sapien
ccaccccggagatgacacgaggctcacatgactctagacacttggtggaaagtgaggcgagaaaaacaatgacttgggccaattacacgactgcaaagctagagctgccaacagggctccagggagcttggcttctgtagaagttctaaggaagcggtacgaactccacggcggtggggcgctaactagcagggacccctgcaagtgttggtcgggggcctcgagctgcctgagctgacacgaggggaggggtctgtgtagccaacaggtgaccgaagggcttgcctgcccacagcttacttgg

SEQ ID NO: 1133 - DNA, 224 bp, Homo sapien
ctgacattttctatagtagatatggaggaggtccaagactaactgtgaaagccctgtgtaaggaatgtgtagtagaacgttgtcgcatattgcgtctgaagaaccaactaaatgaagattataaaactgttaataatctgctgaaagcagcagtaaagggcagcgatggattttgggtggggaagtcctccttgcggagttggcgccagctagctcttgaacag

SEQ ID NO: 1134 - DNA, 250 bp, Homo sapien
cctactctgctgaggtggcgcttcctgctaagggcccttctctgccctttctgccctccttcccatcccacatgctgagccgccacaaagaccaaagaagtgatggcttttctctgtcccctgctgctctgaggggagaggggtgggtctcctgagccactcagatgggaaagtcccttactcggcccctccctccccagcagccccaagctttacactggatgcagcgatcaacccaccactcaccagg

SEQ ID NO: 1135 - DNA, 315 bp, Homo sapien
ccaatgggctttgctgtagcttgctgaaatcaccaagcaggagagatttaaccagaggcgatgtgtccagtcaccagcatagagccatcctctgtgtcaccatccacacgcagggccttctggtagacctcatgcaatgccctccatgttaatattcatcagaaaatggataattaggggggccagcaaaaatatcaagggtcaaatatcgcacatttctgtttaggccatctatggctttcatctcctctgaagtcaactggaattcaaacacctgcacgttccgtctgatgcgctgctcattgtagctcttgg

SEQ ID NO: 1136 - DNA, 377 bp, Homo sapien; identical to SEQ ID NO: 1127

SEQ ID NO: 1137 - DNA, 250 bp, Homo sapien
ctgttcaacttccaactctaaataggcaccattaaacaaaaaaccccagtattttaaatttctccagcacacattccaggatcaatgctctgaactgtaatcagctagtaattcataacgggaatacagccttagaatggaagctatattgcttccctgccccctttctcttacaattggagagtgtaggtattaagggatacaaagtcagaggaagaataattaaaaagaaaaatgcccaaagctgcag

SEQ ID NO: 1138 - DNA, 511 bp, Homo sapien
  misc_feature (1)...(511): n = A,T,C or G
tcgaccaggtcctcctgggccatctggtccccgaggtcagcctggtgtcatgggcttccccggtcctaaaggaaatgatggtgctcctggtaagaatggagaacgaggtggccctggaggacctggccctcagggtcctcctggaaagaatggtgaaactggacctcagggacccccagggcctactgggcctggtggtgacaaaggagacacaggaccccctggtccacaaggattacaaggcttgcctggtacaggtggtcctccaggagaaaatggaaaacctggggaaccaggtccaaagggtgatgccggtgcacctggagctccaggaggcaagggtgatgctggtgcccctggtgaacgtggacctcctggattggcaggggccccaggacttagaggtggagctggtccccctggtcccgaangaggaaagggtgctgctggtcctcctgggccacctggtgctgctggtactcctggtctgcaaggaatgcctggagaaaga

SEQ ID NO: 1139 - DNA, 505 bp, Homo sapien
ctgtggactccagcatgtttctgataattatgcaagcaacaattctgtagcctcaagtaagaccacctgtgaacttgatcattatctggcccaaatatgaagataaactataactttggagtttgtttcctatttgtattcacattctgcttcctaaatcagttttctaaattgtgcctgcaattaggcattggtcaggggtgaatggctcttttcacagagagtagccaaccagagacctttgctttgatatcatcaactgcagagaatgctgttgatgggaatgctggaagcagaaactttgtcatcggaaaaacttttcttgtatgcatgagactcaacatcaggatccacagcttaaagatgggaattcaggtatgaaagaaaacaggcaaggaggcactgagggagaaagacacagactttatcgctctgtggctcattgttactggaatattctaaaactcttgttcacatgctattatgacttataaagcagcaacag

SEQ ID NO: 1140 - DNA, 256 bp, Homo sapien
ctgtagcttctgtgggacttccactgctcgggcgtcaggctcaggtagctgctggccgcgtacttgttgttgctctgtttggagggtttggtggtctccactcccgccttgacggggctgccatctgccttccaggccactgtcacagctcccgggtagaagtcactgatcagacacactagtgtggccttgttggcttggagctcctcagaggagggcgggaacagagtgacagtggggttggccttgggctgac

SEQ ID NO: 1141 - DNA, 371 bp, Homo sapien
ccagggccccattctgtctgtgggactgtgggttctcagtggaattgttgcctttcttgtcgtggagaaatttgtgagacatgtgaaaggaggacatggtcacagtcatggacatggacacgctcacagtcatgcacgtggaagtcatggacatggaagacaagagcgttctaccaaggagaagcagagctcagaggaagaagaaaaggaaacaagaggggttcagaagaggcgaggagggagcacagtacccaaagatgggccagtgagacctcagaacgctgaagaagaaaaaagaggcttagacctgcgtgtgtcggggtacctgaatctggctgctgacttggcacacaacttcactgatggtctgg

SEQ ID NO: 1142 - DNA, 312 bp, Homo sapien
  misc_feature (1)...(312): n = A,T,C or G
cctcccacactgtcaaatgtcaactccaccagcactgagacaatgagtagatgagaatgtagaaagagggaaggtggtaggtaaaggagcggaaggaagaggtggggaaagagggaaggtggtaggtaaaggagcggaaggaagaggtggggaaagagggaaggagagaagggaaggagggaagagaaagaaggaagaaaaggaaagcatggcccggctagagacaaagccagaggtgatcaggtcagcagcaggagaggctcagaagggagcctctcgggaagtgcaggcngccatgagggctcgtttcag

SEQ ID NO: 1143 - DNA, 367 bp, Homo sapien
ccagacgtggtggctcacacctgcaatcccagcaccttaggaggccgaggcaggaggatccttgaggtcaggagttcgagaccagcctcgccaacatggtgaaaccccatttctactaaaatacaaaaaattagccaagtgtggtggcatatgcctgtaatcccaactactcagaaggccgaggcaggagaattacttgaacgcaggagaatcactgcagcccaggaggcagaggttgcagtgagccgagattgcaccactgcactccagcctgggtgactgagcaagactccatctcagtaaataaataaataaataaaaagcgctgcagtagctgtggcctcaccctgaagtcagcgggcccagg

SEQ ID NO: 1144 - DNA, 159 bp, Homo sapien
cctggaggagcggccgcacacacagccaggcgctaggctccctgcgggacctcgggaagggggaagagcgtcaacgatttacggagggtccagccgctgggtcagattgagacaaaccattgtgtggttgggttcgggtcagcaggctggagagggttc

SEQ ID NO: 1145 - DNA, 450 bp, Homo sapien
ccatgggtgtctggagcaccctgaaactgtatcaaagttgtacatatttccaaacatttttaaaatgaaaaggcactctcgtgttctcctcactctgtgcactttgctgttggtgtgacaaggcatttaaagatgtttctggcattttctttttatttgtaaggtggtggtaactatggttattggctagaaatcctgagttttcaactgtatatatctatagtttgtaaaaagaacaaaacaaccgagacaaacccttgatgctccttgctcggcgttgaggctgtggggaagatgccttttgggagaggctgtagctcagggcgtgcactgtgaggctggacctgttgactctgcagggggcatccatttagcttcaggttgtcttgtttctgtatatagtgacatagcattctgctgccatcttagctgtggacaaaggggggtcag

SEQ ID NO: 1146 - DNA, 324 bp, Homo sapien
ccatacagggctgttgcccaggccctagaggtcattcctcgtaccctgatccagaactgtggggccagcaccatccgtctacttacctcccttcgggccaagcacacccaggagaactgtgagacctggggtgtaaatggtgagacgggtactttggtggacatgaaggaactgggcatatgggagccattggctgtgaagctgcagacttataagacagcagtggagacggcagttctgctactgcgaattgatgacatcgtttcaggccacaaaaagaaaggcgatgaccagagccggcaaggcggggctcctgatgctgga

SEQ ID NO: 1147 - DNA, 191 bp, Homo sapien
ccacgaaaatcaatgagaagccacaggtgatcgcggactatgagagcggacgggccatacccaataaccaggtgcttggcaaaatcgagcgggccattggcctcaagctccggggaaaggacattggaaagcccatcgagaaggggcctagggcgaaatgaacacaaagcctcgaaatcagtgtgctccag

SEQ ID NO: 1148 - DNA, 344 bp, Homo sapien
ctgtccaatgacaacaggaccctcactctactcagtgtcacaaggaatgatgtaggaccctatgagtgtggaatccagaacgaattaagtgttgaccacagcgacccagtcatcctgaatgtcctctatggcccagacgaccccaccatttccccctcatacacctattaccgtccaggggtgaacctcagcctctcctgccatgcagcctctaacccacctgcacagtattcttggctgattgatgggaacatccagcaacacacacaagagctctttatctccaacatcactgagaagaacagcggactctatacctgccaggccaataactcagccagtgg

SEQ ID NO: 1149 - DNA, 329 bp, Homo sapien
ctgacccactcactgggcgggggcacaggctctggaatgggcactctccttatcagcaagatccgagaagaataccctgatcgcatcatgaataccttcagtgtggtgccttcacccaaagtgtctgacaccgtggtcgagccctacaatgccaccctctccgtccatcagttggtagagaatactgatgagacctattgcattgacaacgaggccctctatgatatctgcttccgcactctgaagctgaccacaccaacctacggggatctgaaccaccttgtctcagccaccatgagtggtgtcaccacctgcctccgtttccctgg

SEQ ID NO: 1150 - DNA, 406 bp, Homo sapien
ccagttatttgcaagtggtaagagcctatttaccataaataatactaagaaccaactcaagtcaaaccttaatgccattgttattgtgaattaggattaagtagtaattttcagaattcacattaacttgattttaaaatcagttttgtgagtcatttaccacaagctaaatgtgtacactatgataaaaacaaccattgtattcctgtttttctaaacagtcctaatttctaacactgtatatatccttcgacatcaatgaactttgttttcttttactccagtaataaagtaggcacagatctgtccacaacaaacttgccctctcatgccttgcctctcaccatgctctgctccaggtcagcccccttttggcctgtttgttttgtcaaaaacctaatctgct

SEQ ID NO: 1151 - DNA, 346 bp, Homo sapien
ctgcgtgagtaccaggagctgatgaacgtcaagctggccctggacatcgagatcgccacctacaggaagctgctggagggcgaggagagccggctggagtctgggatgcagaacatgagtattcatacgaagaccaccagcggctatgcaggtggtctgagctcggcctatgggggcctcacaagccccggcctcagctacagcctgggctccagctttggctctggcgcgggctccagctccttcagccgcaccagctcctccagggccgtggttgtgaagaagatcgagacacgtgatgggaagctggtgtctgagtcctctgacgtcctgcccaagtgaacag

SEQ ID NO: 1152 - DNA, 427 bp, Homo sapien
ctggactgctgtacatcaaggacagattaactggaaaacatatgttccttatgcgtgatcgagagccattcagaaaagacttcctttgtgttcagcctatacttttccatatggtataccttgaaaaaaattagcacaccatggttatttttctaccttttataaaagacagagcctgtttactcatttagaagatagagaaaattggtctaaaattgaacatcctagattcacactcccaagtcacttaaggtgatttgatggtgaggaaaatgattgacagagcccaacaatgatctcaggaattacattttccaacagaccaaaaaatgttttcatgtagcagcaatgcagatttggtgaatatttaatatatattttagtatgtatttcactttatgactgacaattaaaaaatattgtttgg

SEQ ID NO: 1153 - DNA, 331 bp, Homo sapien
ctggccggcggtgcagatctggagtccagcctcagggatgcgctactttccattctctgcattgaacattcgttctgtcagcatccgctccagcttcactgcatcagcggcaaacttgcggatcccgtcagagagcttctccacagccatctggtcctcgttgtgcaaccaacggaaagacttctcatccaggtggattttttccaggtcactggcttgggctgggggacaagaaccagccttccatgcctgctccatgtccctgcccaccttggccccttgggctcagggcctgaaccgctgcacccaagcatctcccaccagggccagg

SEQ ID NO: 1154 - DNA, 403 bp, Homo sapien
ctgaactttcagatgaagttgacttctacttgattgcaggattcagggtttctcagatgttaatacagagtcaaaagcggtggataaaaccttgcaaatggcttgtgcttgttccaggctgttgcactgataaacccacaggctgtattcctcattgcttgcatctgtggtcttcagagccagtaagctttttcccgcccccagaccgtcatcgtaacacaccatccggattattaagtagagagcatgcctgtgcaaaacatcatattgatctgatgttgatacttttatgccatacttggaaactcccataataaattcttcctccggaggaacaaaaggcaactttccatcttgctgggcaacgtctatataatttatcaggtctaatggcccttcaagg

SEQ ID NO: 1155 - DNA, 491 bp, Homo sapien
cctccctctcagagcttgccccagggactctctggccctcagggttcaatgtattctgaccaaggccaagctttcctggggctcagggaaaatcacactttgctacccgaagctgtatcccctcagatgccaggaaggccgtgatcatctgactccaccctcctgagacacattctctccctgactgtcctgttctaagtcagcggagcaccttaggatggaggggtggaggcgaggccagatgcagcctctgtgaacaggtgcctggaggctgggaaatgaccctgagagggcaggacacagcaaccgtgggcttaaggtgaccttgagagcaagcttggcccactttacaattctgttcagagccagcccctaacatggtggtcatttattcatttgttccctcattttaaaaaatgtaaggccaggcatggtggctcacgccgggtaatcccagcactttgggaggccgaggcaggcagatcacctga

SEQ ID NO: 1156 - DNA, 586 bp, Homo sapien
agcaaatagaagcaatcagggcactgcaagttgtgactactccaagatgtgaatcatggatcatgcaaattacaatcatgttttaacctgacctccaaagggagaataaagtaaaaattatcccatgtgaggattattcaccagtttatatgtcattagttaccagtttttctttatgaataatgtttagcaatattataaagtatatctaatagttatcaggtttttggcttgttactttttggtagtaacttataaaactgactggaaaagaccaataaggcactgtttgcatgttacaaattatatccaaagaccaaaagctgttaataagaaatcttccaataaaaccacatcatattttcttttttatttacacccacatcaggattacaactttatcaggactgcaccttgatcaggaagggatgtttctcttacaaggctaataagaaaggaacaataaatttgctgatgaaaaaagtcatgcatttaaaaattttaactttaatttttaattgagggcaatattttaaagaaatgctcattagtcattcctttaaattgtgtgtgtgagagagagaaa

SEQ ID NO: 1157 - DNA, 392 bp, Homo sapien
  misc_feature (1)...(392): n = A,T,C or G
cctccggctggtgttctgagggttgccaggccatcgtggacacaggcacctctctgctcactgtgccccagcagtacatgagtgctcttctgcaggccacaggggcccaggaggatgagtatggacagtttctcgtgaactgtaacagcattcagaatctgcccagcttgaccttcatcatcaatggtgtggagttccctctgccaccttcctcctatatcctcagtaacaacggctactgcaccgtgggagtcgagcccacctacctgtcctcccagaacggccagcccctgtggatcctcggggatgtcttcctcaggtcctactattccgtctacgacttgggcaacaacagagtaggctttgccactgncgcctagacttgctgnctc

SEQ ID NO: 1158 - DNA, 375 bp, Homo sapien
gggaaaaataattttattcctcaaatgatcagcacattcagaagcaggacagaggagctctgatgacatctctgggggactcaaagcggccctcattttctggtattttcccaggtgattctcttccaacctgtgagtcctgctctctttcctcccatctgaagtttgagacatcctctgccacaaggaaagccaccaataccagcccaaagagccaccagagaggaaccaaaccacatgcatcaagttataggaaggatgcaagaagggaaattaggaaggaaagggaggagtttagttggcattctggggcatgctaacatgagggcgatggtctctctccaagtcgctggacatatcccttttctttccagg

SEQ ID NO: 1159 - DNA, 361 bp, Homo sapien
  misc_feature (1)...(361): n = A,T,C or G
gtttattgtaaaaaacaaaaaactctgtattgtgcacatgaagacctggagatgtgccgacttcctgtccccaaagccaatcttccccgccaaggcgactgaggatttcaagggctcagagttactgcaggaatccaggtgacaccaggaagagaagggggaggaggggaatcggaggggatgggtttaaaaggcagaggggagggagatggaagggaatgaggaggagggagactgagggggctgcctttccttggggactggggaactcatgccctgcccccacccgcagggctccaggggtgagagaaaggggtggagaataaagaattgggcancagggtgatggggggaacagcag

SEQ ID NO: 1160 - DNA, 142 bp, Homo sapien
cgcaatgttgccagtgtctgtctgcaggttggctacccaactgttgcatcagtaccccattctatcatcaacgggtacaaacgagtcctggccttgtctgtggagacggattacaccttcccacttgctgaaaaggtcaagg

SEQ ID NO: 1161 - DNA, 193 bp, Homo sapien
ccaaagcctacgaccacctcttcaagttgctgctgatcggggactcgggggtgggcaagacttgtctgatcattcgctttgcagaggacaacttcaacaacacttacatctccaccatcggaattgatttcaagatccgcactgtggatatagaggggaagaagatcaaactacaagtctgggacacggctgg

SEQ ID NO: 1162 - DNA, 265 bp, Homo sapien
cctgggtgccacgattcccagcctggagcgcagccaggacgtgggagaccttctcagagactctccgggcacactctatgagctccttcttggtgtaggcatcactggggctgcactgcagggcgcctgccttggtgaccagagcggcacagccatggcccagctcctgtacccggtgtttgatatgggaacctatctcttcattttcagcagccaccgctgcaggcttggcctccgaggccagacggccatagtcactggtcag

SEQ ID NO: 1163 - DNA, 337 bp, Homo sapien
  misc_feature (1)...(337): n = A,T,C or G
ctgcagagtgggganaggcttttgccactagaaacttccaggatgcacgagatcaaggaattaagtctgtaacaaaataacaggatgctctgtgaagtccaaagaattgcttgaggcaaactgcagagctccatgagatcagcaaccccaagagcttttacaccgccggacacggtttaataggaaaaaaatctcctatactgnntattcanaaccaaatgaanagaaatgtcaaaggagtcggaaacaatatgtcaaattangtaaattcctgacctgacccanattttgcngaacatttgatcctaaactgtgctgtccacgtccttaggatcac

SEQ ID NO: 1164 - DNA, 368 bp, Homo sapien
  misc_feature (1)...(368): n = A,T,C or G
ccagacgtggtggctcacacctgcaatcccagcaccttaggaggccgaggcaggaggatccttgaggtcaggagttcgagaccagcctcgccaacatggtgaaaccccatttctactaaaaatacaaaaaattagccaagtgtggtggcatatgcctgtaatcccaactactcagaaggccgaggcaggagaattacttgaacgcaggagaatcactgcancccangaggcanaggttgcantgagccgagattgcaccactgcactccagcctgggtgacagagcaagactccatctcagtaaataaataaataaataaaaagcgctgcagtagctgtggcctcaccctgaagtcagcgggcccagg

SEQ ID NO: 1165 - DNA, 267 bp, Homo sapien
  misc_feature (1)...(267): n = A,T,C or G
ctgggaaggaggctcctccgccttctcctgtttgtcatcctcctcatcagactcgacctccatctcaacttcctcactctccccaaacttttcatagcgctcctgaatgaggattcgggcccccagctcctctggcgtggtggggggagggaagttcccttgctcattgggttggaagnccactgtttccaccaccacaaaatcatgccantcnatctgagcataggccacccgntccttctccttctccnnttcttccttcttcct

SEQ ID NO: 1166 - DNA, 433 bp, Homo sapien
  misc_feature (1)...(433): n = A,T,C or G
ctgtctgtacactttttcttgggggaagagttcttgtcttcagtttactgcagtagggttcctggctctgttacatgctcatgtgttccggaagaacacatgaaatatcatcccacggatgacgatacagcccctgcttcancctcttctgatcaagatagtgtccaatgaaccccatactccttcccagcacaaagatgccattgagggctccaatgtcaatatattcatcagcttcctccctgcaacacacatcaacttgtagttttaaaaggctcacgtgactgccctcctccccacagacagtactactactgcccaanaatgagaagaaaaggggtgctctgggtggtngcattacaggcaatttttgttntcttnnttatacctctccttattttncaaatnttctattatgagtntgcattacttt

SEQ ID NO: 1167 - DNA, 362 bp, Homo sapien
cctctggctctttcttcagccacttctccagctcctgcaggttctggtctgagtagtcagtgacgacgatctccttaaaggattcacaagcagagaggagctgatagatagtggggccagagccgatgtcaatcagcaggtctcccttcacaccgtctaggcagaatatcttgaaaagatttttcagaaggtgcttaagaatctggctttctgcagagtgcctagaaccaaacttgtaatatttttctaggtaatcccgagggttaaaatggcttagataggtgtccttggaggtgaagcctgattccattatgtctcacttccgtaccactggagcactgccctccttctctttcctccag

SEQ ID NO: 1168 - DNA, 459 bp, Homo sapien
  misc_feature (1)...(459): n = A,T,C or G
gcagtcatggggcccaggaccatgccactggccctgctcccccagccgcagcctcacctgcaggtgctcctcgatgtccttgcggtcgtaggtgatgccactgggcgtgatgcacggctcccgcatcagctcaaagctgatcttgccacacaggtagtcggggatgtctcgcttctgtggcacaggggcacacggtcagaggctgaaaaggggcactgcacgagcacctgccagccatcggcagcaagcgacacacactcaccttcctcttctcatccacctgagaaaaaagctcgtccatgtccgccatgtacttgtcctgtgaagagttgagtgctgtgcttgggggagacaccccacctccctcctncatggggcacanacccaacacaaggcggggatgctnccacgccacgtgcacacacacagacccacatgtgggtggggggcaccctcacg

SEQ ID NO: 1169 - DNA, 386 bp, Homo sapien
ccaggccacctgtgcggggctcctcgatgtggaaggttcgggtgaggagattgtagaaggagccgtagcacacggccaccacagtgcacgtgaggcagatcacgctgtagggcatgctgaagtccggtgtcggcaggttcaccagcagcggctccgtgtagagccgcacaaagtagttagagccatcagagactgggaacaggctgttgaagaggggactctcttcccagtccactggcttggctgctaccatgctgggcacaagggcgctgaggacagatgggctgacatagaagccatggttaggatctggcgtgtactcggtccacttcagcagcgcccgctcaaactggatggaaaccttggtgactgagttggccggccag

SEQ ID NO: 1170 - DNA, 480 bp, Homo sapien
ctatttctctgttagtgtttaaccaaccatctgttctaaaagaagggctgaactgatggaaggaatgctgttagcctgagactcaggaagacaacttctgcagggtcactccctggcttctggaggaaagagaaggagggcagtgctccagtggtacagaagtgagacataatggaatcaggcttcacctccaaggacacctatctaagccattttaaccctcgggattacctagaaaaatattacaagtttggttctaggcactctgcagaaagccagattcttaagcaccttctgaaaaatcttttcaagatattctgcctagacggtgtgaagggagacctgctgattgacatcggctctggccccactatctatcagctcctctctgcttgtgaatcctttaaggagatcgtcgtcactgactactcaggaccagaacctgcaggagctggagaagtggctgaagaaagagccaga

SEQ ID NO: 1171 - DNA, 317 bp, Homo sapien
cctcagcagccctgccacggatctgcccgattctttcgcatcaagaagttgatcttgcgagccatttccatgttgtagatccgccggcacctttcatagctttccctctgtcgccggcggcatggcttctcataataccgccgatgcttaatgtcctcaatgagcccatccatagtgaggattctgtttagggtcctgtatgcgctttccacgttcccttcctgtaccatcacagtcctggcgatgaacttcagatgttttgccatgaccttggatttaaaccttcactctgtagagcctcgcgcgctcagtaccta

SEQ ID NO: 1172 - DNA, 202 bp, Homo sapien
  misc_feature (1)...(202): n = A,T,C or G
ggcaacgggaggaacagcagcagaggcagcangagcaggaggagcgtgaacgagaagagcancggcgatnngctgcnctcagtgaccganagaagagagctctggctgcanagcgccgactcgctgcccagttgggagcccctacctctccaatccctgactctgcaatcgtcaatactcgacgctgctggagttgtggggc

SEQ ID NO: 1173 - DNA, 173 bp, Homo sapien
ctgcctgggttgtggccgccctagcatcctgtatgcccacagctactggaatccccgctgctgctccaggccaagcttctggttgattaatgagggcatggggtggtccctcaagaccttcccctaccttttgtggaaccagtgatgcctcaaagacagtgtcccctccacag

SEQ ID NO: 1174 - DNA, 301 bp, Homo sapien
ccaagagctacaatgggcagcgcatcagacagaacgtgcaggtttttgagttccagttgactgcggaggacatgaaagccatagatggcctagacagaaatctccactattttaacagtgatagttttgctagccaccctaattatccatattcagatgaatattaacatggagagctttgcctgatgtctaccagaagccctgtgtgtggatggtgacgcagaggacgtctctatgccggtgactggacatatcacctctacttaaatccgtcctgtttagcgacttcagtcaactacag

SEQ ID NO: 1175 - DNA, 537 bp, Homo sapien
cctgcagggctcggccgtaggagaaggtcagggcccagggcttcagcagggggcacttgttaatggcattgaggttgatggacgcctcctcctcactctggcctccagacaggaaggtgatcccagtgacagcggggggcactgtgcggcgcagcgctgtgacggtcgccatggcaatctcctcatgagaaaacttctgagtgcaagcatggcctggggtgaccatgttgggcttcagcaaggtgccttccaggtagatgtggtggtcactcagagccttgtagacagcagccagcaccttctcggtcacatactggcagcgcttcaagtcatggtccccatcagggaggatctcaggctccacgatgggcacaatgccattctgctggcagatactggcataacgggccagaacattggcattttccatgatggcgagggctgagggggtgtgttccccaatcttcagcacacaacgccacttggcgaagtcagctccgtccttcttgtactgggcacagcgctcagacagcccat

SEQ ID NO: 1176 - DNA, 384 bp, Homo sapien
  misc_feature (1)...(384): n = A,T,C or G
ctgacaaaaaatgtgaaatttccacaaaatatccaacttatgtgactaaacgcagtagtttttttaaaaggggagatagaaaataaatggttttgttggagtgcattttagtaagcctttgcagtaaaatgacggttgtaactactaaaccaaatttagttttcacagcatggttttgttgttttccccttgtttttcagaggtaaattttgcattatatccttcagtattttaacactattttggcagtttacacattactttttgnttttccttcctttttgngaaatgtattaagttgtggttcttattgaaacagtattatataatgttngcttaattatatcatgtgatgctcanntctattntgatttattcattagt

SEQ ID NO: 1177 - DNA, 562 bp, Homo sapien
  misc_feature (1)...(562): n = A,T,C or G
ccaacaacatgcaggaagctcagagtatcgatgaaatctacaaatacgacaagaaacagcagcaagaaatcctggcggcgaagccctgggctaaggatcaccattactttaagtactgcaaaatctcagcattggctctgctgaagatggtgatgcatgccagatcgggaggcaacttggaagtgatgggtctgatgctaggaaaggtggatggtgaaaccatgatcattatggacagttttgctttgcctgtggagggcactgaaacccgagtaaatgctcaggctgctgcatatgaatacatggctgcatacatagaaaatgcaaaacaggttggccgccttgaaaatgcaatcgggtggtatcatagccaccctggctatggctgctggctttctgggattgatgttagtactcagatgctcaatcagcagttccaggaaccatttgtagcagtggtgattgatccaacaagaacaatatccgcagggnaaagtgaatcttggcgcctttaggacatacccaaagggctacaaacctnctgatgaangaccttctgagt

SEQ ID NO: 1178 - DNA, 353 bp, Homo sapien
  misc_feature (1)...(353): n = A,T,C or G
cgcgtctggatggccgaatcattcgcacagactgggacgcaggctttaaggagggcaggcaatacggccgtgggcgatctgggggccaggttcgggatgagtatcggcaggactacnatgctgggagaggaggctatggaaaactggcacagaaccagtgagtggtgagagctctgtcagtgacaaacactcctttggcctgttgaatttgctgaagaacatcacctaaagtctgcacacgagcccatttttaccaagatttgatcagtgtctttactgagctggaagcctctgaaagttattaaaggacagaatccaaaagaatgcctttaattcttgtctgagaatcttgg

SEQ ID NO: 1179 - DNA, 288 bp, Homo sapien
ccaatgggatcctcaaggtgcctgccatcaatgtcaatgactccgtcaccaagagcaagtttgacaacctctatggctgccgggagtccctcatagatggcatcaagcgggccacagatgtgatgattgccggcaaggtagcggtggtagcaggctatggtgatgtgggcaagggctgtgcccaggccctgcggggtttcggagcccgcgtcatcatcaccgaggttgaccccatcaacgcactgcaggctgccatggagggctatgaggtgaccaccatggatgagg

SEQ ID NO: 1180 - DNA, 523 bp, Homo sapien
ctggagagatggagcggtgggcaccgtcatccttcctcatcagccacatagaaggacagtggcgatttcagcccagcttttctgactgcttgtaaattgaagcccagaactggtttgccacctgtgggatcgactcagcattttaaaataggaggcagtcgtgagtgcaggtttcttgcagctccgggtggccctgggctccaggtcaggagacctcagctcctgtccctgatctgtggttgtcaagccttgcagactctaaactcagcatctttatctgtcagacgtagacacgtggctcccgtggttggtgcggttggaatagctgaggtaatacacggacctccaagcactagagcagtatgaggagttctgaggaatggttatcctgcggtgcctgtggtccacagcaagccattcttatcccatccggtttacttcccacagccactttgtaagcataggcattatcctctaccccatcatagaaatgaggaaaagaatcaccaagagagtaagcagc

SEQ ID NO: 1181 - DNA, 493 bp, Homo sapien
  misc_feature (1)...(493): n = A,T,C or G
cacagatgaaggctttgtgatacctgatgaagggggcccacaggaggagcaagaagagtattaacagcctggaccagcagagtaacatcggaattcttcactccaaatcatgtgcttaactgtaaaatactcccttttgttatccttagaggactcactggtttcttttcataagcaaaaagtacctcttcttaaagtgcactttgcggacgtttcactccttttccaataagtttgagttaggagcttttaccttgtagcagagcagtattaacacctagttggttcacctggaaaacagagaggctgaccgtggggctcaccatgcggatgcgggtcacactgaatgctggagagatgttatgtaatatgctgaggtggcgacctcagtggagaaatgtaaagactgaattgaattttaagctaatgtgaaatcanagaatgttgtaataagtaaatgccttaagagtatttaaaanatgcttccacattt

SEQ ID NO: 1182 - DNA, 329 bp, Homo sapien
cgcgtctctgacactgtgatcatgataggggttcaaacagaaagtgcctgggccctccttctaagtcttgttaccaaaaaaaggaaaaagaaaagatcttctcagttacaaattctgggaagggagactatacctggctcttgccctaagtgagaggtcttccctcccgcaccaaaaaatagaaaggctttctatttcactggcccaggtagggggaaggagagtaactttgagtctgtgggcctcatttcccaggtgccttcaatgctcatcaaaaccaggcatggggaaggccctggcaaactgctccacccgttgcctgaggttgg

SEQ ID NO: 1183 - DNA, 198 bp, Homo sapien
cctgacagacagaagggcttggagattttttttctttacaattcagtcttcagcaacttgagagctttcttcatgttgtcaagcaacagagctgtatctgcaggttcgtaagcatagagacgatttgaatatcttccagtgatatcggctctaactgtcagagatgggtcaacaaacataatcctggggacatactgg

SEQ ID NO: 1184 - DNA, 224 bp, Homo sapien
ctggaggtgcctcagaaggtgcattctgcttcctgcaggggcttgaaacaccaaggcactccagggatcctggagtcaaagcagcagccccggttgttgcactccttgggggtgacatgggggtagccgcagtccaccctgtccttggctggcacggcacactggtttgcagacaggcccacgtactcctcagcagagctggaggacagcaaggccaggaccag

SEQ ID NO: 1185 - DNA, 367 bp, Homo sapien
ccttttacagatgtcagctttcactggcctccatgcacaacctcccactaccacccaatctgcctgccacagcaaagtgcaggcaccctgggccccctggaggatgcgggcaggggctacagggcatccaggatgtggtcgatcttggtgaccagctcctggcgctttcctgagatgagcttctcattctcaatgtacgtgtctttcttgagcttgccagccaccaggcgctcagcctccaccgccgacttcagcaccagctccttgacctgtgcatccagcttctgcatttcgctcactctgtcgcacagatcagagccctctgtcttcagcctggactgcagcagtgcaatctcactggtcaagg

SEQ ID NO: 1186 - DNA, 188 bp, Homo sapien
ccattaagcggatgctggagatgggagctatcaagaacctcacgtccttccgacctgggcaagagctgtagcctgtcggttgcctactctgctgtctgggtgacccccatgcgtggctgtgggggtggctggtgccagtatgacccacttggactcaccccctcttggggagggagtcctgggcctgg

SEQ ID NO: 1187 - DNA, 379 bp, Homo sapien
gttgatgctactctgaagtctctcaacaaccagattgagacccttcttactcctgaaggctctagaaagagcccagctcgcacatgccgtgacttgagactcagccacccagagtggagcagtggttactactggattgaccctaaccaaggatgcactatggatgctatcaaagtatactgtgatttctctactggcgaaacctgtatccgggcccaacctgaaaacatcccagccaagaactggtataggagctccaaggacaagaaacacgtctggctaggagaaactatcaatgctggcagccagtttgaatataatgtagaaggagtgacttccaaggaaatggctacccaacttgccttcatgcgcctgctgg

SEQ ID NO: 1188 - DNA, 384 bp, Homo sapien
cgcgtcggactgcagccagtccgtttcctttctttagccagccatcctggtactgtagtttaggggttgatggtggttgaaattgatttctggctggttactaaggtgcctgctagccattgtataaaattaaaacatgaagaatattttttttttgagcatggctagtggatttaaaacaacacatacctgtcactgctggagtcaaacttataaaaagccttaagtggaaagtgttccagacggagactctgagttaatagaggagtagaagctggtgttaaagttcccacgacgcacatggctttgccagaaactctgtttaatgatcggcctttcacctcttcacttatccttagtcccagtagccaggatacctgatgg

SEQ ID NO: 1189 - DNA, 419 bp, Homo sapien
  misc_feature (1)...(419): n = A,T,C or G
ggaaaaaccagccactgctttacaggacagggggttgaagctgagccccgcctcacacccacccccatgcactcaaagattggattttacagctacttgcaattcaaaattcagaagaataaaaaatgggaacatacagaactctaaaagatagacatcagaaattgttgagttaagctttttcaaaaaatcagcaattccccagcgtagtcaagggtggacactgcacgctctggcatgatgggatggcgaccgggcaagctttcttcctcgagatgctctgctgcttgagagctattgctttgttaagatataaaaaggggtttctttttgtctttctgtaaggtnnacttccagcttttgattgaaagtcctagggtgattctatttctgctgtgatttatctgctgaaagctcag

SEQ ID NO: 1190 - DNA, 173 bp, Homo sapien
ccaggtactggcacatcatgctctggatgggggtggtggtgtcctgtaggcagagaaacaggaaattgtcgtagtcagtatcgagcagcgtggcctcgttcgccaccgtatagttgatcttgaacttctttggattctcagtcttctctccaaggaccttcttctcaacacag

SEQ ID NO: 1191 - DNA, 341 bp, Homo sapien
cctcctgccagcagttcttgaagcttctttttcattcctgctactctacctgtatttctcagttgcagcactgagtggtcaaaatacatttctgggccacctcagggaacccatgcatctgcctggcatttaggcagcagagcccctgaccgtcccccacagggctctgcctcacgtcctcatctcatttggctgtgtaaagaaatgggaaaagggaaaaggagagagcaattgaggcagttgaccatattcagttttatttatttatttttaatttgttcttttctccaagtccaccagtctctgaaattagaacagtaggcggtatgagataatcagga

SEQ ID NO: 1192 - DNA, 324 bp, Homo sapien
ttggaggttggcggcgcggggctgaaggctagcaaaccgagcgatcatgtcgcacaaacaaatttactattcggacaaatacgacgacgaggagtttgagtatcgacatgtcatgctgcccaaggacatagccaagctggtccctaaaacccatctgatgtctgaatctgaatggaggaatcttggcgttcagcagagtcagggatgggtccattatatgatccatgaaccagaacctcacatcttgctgttccggcgcccactacccaagaaaccaaagaaatgaagctggcaagctacttttcagcctcaagctttacacag

SEQ ID NO: 1193 - DNA, 521 bp, Homo sapien
ctgctttgttttctgttggcagtggagggacaaggtgagaggagccaggggtagtcatgaacaccagtgggttctgccctgggcagctccccaccttctttaagagagtactgtgtctcagctccagcagtctcaactgggaagacccaggactcctgctcttttctctaatccctgggagacgaggtccagctaaggtagagtaagcagtcagtgaccaggcaggctggtttgggaggtcactgcctggaggacgggatcttgtattcttcggaagatggctgggaaattcttccctccattacgtagaactttcttcccctcctcagttgaggtgcctagatgtcccacaacggggtcttcactcaggtcctccagaggcacacgctcaaacagtgggtgctcttcgaaatgagtgcacatccagtcgtgtagctccagcacatcggttatggtatacaccagcccctgcataggcaaaatcaccctagacaggaggctgcatgcaacgtcagcagcca

SEQ ID NO: 1194 - DNA, 208 bp, Homo sapien
ccagtgactagaaggcgaggcgccgcgggaccatggcggcggcggcggacgagcggagtccagaggacggagaagacgagggagaggaggagcagttggttctggtggaattatcaggaattattgattcagacttcctctcaaaatgtgaaaataaatgcaaggttttgggcattgacactgagaggcccattctgcaagtggacag

SEQ ID NO: 1195 - DNA, 499 bp, Homo sapien
ccagaaaggaaagacaataattttgttttttcattttgaaaaaattaaatgctctctcctaaagattcttcacctactttggtctccataacttctatgttttctttccttctgacacactagtgcccctaaattgtgatttgcctatacgtttagggccggggttggaagatgttaacaaccatttaagattcatttctgcagtgggagtgggtggagtttcaccctctgggaaaggggcaggtgacaggtatttatcagtcagtgcctctctagctcttgtaggaagaagcacacgcaggatggagtctagaggatgagcgatattgactagcaattcatgggctccctccagcagtgcgagggtcagagtttctggagccttgggaggaggcatccctgtgagggggggttagggagatgggagggcaccaggaaaagtgattagaagtcaggtatgggaaggctaaattaggacagagtcgagtacatctctgct

SEQ ID NO: 1196 - DNA, 455 bp, Homo sapien
ctgacccccctttgtccacagctaagatggcagcagaatgctatgtcactatatacagaaacaagacaacctgaagctaaatggatgccccctgcagagtcaacaggtccagcctcacagtgcacgccctgagctacagcctctcccaaaaggcatcttccccacagcctcaacgccgagcaaggagcatcaagggtttgtctcggttgttttgttctttttacaaactatagatatatacagttgaaaactcaggatttctagccaataaccatagttaccaccaccttacaaataaaaagaaaatgccagaaacatctttaaatgccttgtcacaccaacagcaaagtgcacagagtgaggagaacacgagagtgccttttcattttaaaaatgtttggaaatatgtacaacttcgatacagtttcagggtgctccagacacccatggacctg

SEQ ID NO: 1197 - DNA, 444 bp, Homo sapien
cctggatgtggctcttcgcactgaaggccaagtagtagatcacaaggccgatcgccgcagccagcacctcagtggacacccagggcccgttccaagtgccccgatggtccacgctgactgtaaacagaggcgggatgatggaaatgtcctcgttattcctctgagccttcctgaggaggctgtaggactcctcgtcgaagaatctaacctcataggtgcctgcgtgggcgctcttgtggttcaggcttcaggacacctgataacgccccacatcctggcctcgagtgacagggaattgttttccaccgacgtcagcatagagagccatgttctggaccctgttcttgcatgtcagggagatctccacaatgaagacggtctcagtggaaatgacagcgtcagaagtggtgtagtaggaaggggtgatctggggctccaggcagg

SEQ ID NO: 1198 - DNA, 450 bp, Homo sapien
ccatgggtgtctggagcaccctgaaactgtatcaaagttgtacatatttccaaacatttttaaaatgaaaaggcactctcgtgttctcctcactctgtgcactttgctgttggtgtgacaaggcatttaaagatgtttctggcattttctttttatttgtaaggtggtggtaactatggttattggctagaaatcctgagttttcaactgtatatatctatagtttgtaaaaagaacaaaacaaccgagacaaacccttgatgctccttgctcggcgttgaggctgtggggaagatgccttttgggagaggctgtagctcagggcgtgcactgtgaggctggacctgttgactccgcagggggcatccatttagcttcaggttgtcttgtttctgtatatagtgacatagcattctgctgccatcttagctgtggacaaaggggggtcag

SEQ ID NO: 1199 - DNA, 294 bp, Homo sapien
agtcacagttgcacctattcaaaactagctttaaagtgagctatttttaaacttcataaaaatattcatgattttattagtttgaatatttctacaagattcgggtgggcttttcctttaggtgaaaacagctatccactcctgtggccttataactcaggaaatgctggggatgcaaacgtgcaaaaggcagggggaagctgcccaggctgagactggagcagctaggagtgtgcttggggaacgggagctgagatcccggagcagaaatggtcagccgtgctctggagcagg

SEQ ID NO: 1200 - DNA, 258 bp, Homo sapien
agctacctaagaacagctaaaagagcacacccgtctatgtagcaaaatagtgggaagatttataggtagaggcgacaaacctaccgagcctggtgatagctggttgtccaagatagaatcttagttcaactttaaatttgcccacagaaccctctaaatccccttgtaaatttaactgttagtccaaagaggaacagctctttggacactaggaaaaaaccttgtagagagagtaaaaaatttaacacccatagtagg

SEQ ID NO: 1201 - DNA, 403 bp, Homo sapien
ctgagctgctgtctgctttggaaaaccgttcctgccgctgccgatggatggaaatgcaatggatttcagcttcttatcatcagccagggccaagcagtttttcactgtcttttccagaagttcttcacacttgtctgcaccccaaactggactattacagtggatcacaaacttggcaggcaggccatggcctgcgctgacagcagctccagctacttccaagggcccgttctttttccggagttccaggacagcttccacaaactccttgccacctttcttctccagcgtgtttcctaggtcatctttaaggtcaatgtcagcattggtaggattgattatggcctccacctcaaagccggctaaattactgatttcactgtgaataaggttcggcttctgg

SEQ ID NO: 1202 - DNA, 325 bp, Homo sapien
ctgaacctgcgggagtcggccaccatcacgtgcctggtgacgggcttctctcccgcggacgtcttcgtgcagtggatgcagagggggcagcccttgtccccggagaagtatgtgaccagcgccccaatgcctgagccccaggccccaggccggtacttcgcccacagcatcctgaccgtgtccgaagaggaatggaacacgggggagacctacacctgcgtggtggcccttgaggccctgcccaacagggtcaccgagaggaccgtggacaagtccaccggtaaacccaccctgtacaacgtgtccctggtcatgtccgacacag

SEQ ID NO: 1203 - DNA, 518 bp, Homo sapien
ctcaaccacagtctgacaccagagcccacttccatcctctctggtgtgaggcacagcgagggcagcatctggaggagctctgcagcctccacacctaccacgacctcccagggctgggctcaggaaaaaccagccactgctttacaggacagggggttgaagctgagccccgcctcacacccacccccatgcactcaaagattggattttacagctacttgcaattcaaaattcagaagaataaaaaatgggaacatacagaactctaaaagatagacatcagaaattgttaagttaagctttttcaaaaaaccagcaattccccagcgtagtcaagggtggacactgcacgctctggcatgatgggatggcgaccgggcaagctttcttcctcgagatgctctgctgcttgagagctattgctttgttaagatataaaaaggggtttctttttgtctttctgtaaggtggacttccagcttttgattgaaagtcctagggtgattctatttctgctg

SEQ ID NO: 1204 - DNA, 352 bp, Homo sapien
ggggaaaggaggtctcactgagcaccgtcccagcatccggacaccacagcggcccttcgctccacgcagaaaaccacacttctcaaaccttcactcaacacttccttccccaaagccagaagatgcacaaggaggaacatgaggtggctgtgctgggggcaccccccagcaccatccttccaaggtccaccgtgatcaacatccacagcgagacctccgtgcccgaccatgtcgtctggtccctgttcaacaccctcttcttgaactggtgctgtctgggcttcatagcattcgcctactccgtgaagtctagggacaggaagatggttggcgacgtgaccggggcccagga

SEQ ID NO: 1205 - DNA, 250 bp, Homo sapien; identical to SEQ ID NO: 1137

SEQ ID NO: 1206 - DNA, 275 bp, Homo sapien
  misc_feature (1)...(275): n = A,T,C or G
ctgctctcgnngnctcactggatggaccagcacttccgcacgacgcccctggagaagaacgcccccgtcttgctggccctgctgggtatctggtacatcaactgctttgggtgtgagacacacgccatgctgccctatgaccagtacctgcaccgctttgctgcgtacttccagcagggcgacatggagtccaatgggaaatacatcaccaaatctggaacccgtgtggaccaccnnacaggccccattgtgtggggggagccagggaccaatgg

SEQ ID NO: 1207 - DNA, 182 bp, Homo sapien
ccatctcctgctcgaagtccagggcgacgtagcacagcttctccttgatgtcgcgcacgatttcccgctcggccgtggtggtgaagctgtagcctcgctcagtgaggatcttcatgaggtagtcggtcaggtcccggccagccaggtccagacgcaggatggcgtgggggagggcgtagccc

SEQ ID NO: 1208 - DNA, 260 bp, Homo sapien
  misc_feature (1)...(260): n = A,T,C or G
gctggttatgaactcctgacctcaagtgatctgccctcctcagcctcccaaagtgctgggattataggcatgagccactggaatttttctttttttttttctttctttttttttttttttttaaattganacaaggtctggctctatcgcccangctggagtgcagnggcaccatntcggctcactgcaacctctgcctgctgggctcgagccatcctcccacctcagcctcccaagtanttgggactagaggtatgcac

SEQ ID NO: 1209 - DNA, 487 bp, Homo sapien
aaacccactccaccttactaccagacaaccttagccaaaccatttacccaaataaagtataggcgatagaaattgaaacctggcgcaatagatatagtaccgcaagggaaagatgaaaaactataaccaagcataatatagcaaggactaatccctataccttctgcataatgaattaactagaaataactttgcaaggagagccaaagctaagacccccgaaaccagacgagctacctaagaacagctaaaagagcacacccgtctatgtagcaaaatagtgggaagatttataggtagaggcgacaaacctaccgagcctggtgatagctggttgtccaagatagaatcttagttcaactttaaatttgcccacagaaccctctaaatccccttgtaaatttaactgttagtccaaagaggaacagctctttggacactaggaaaaaaccttgtagagagagtaaaaaatttaacacccatagta

SEQ ID NO: 1210 - DNA, 216 bp, Homo sapien
ccactcagctcagcgggcgacgtgcccctacaagttggcagaagtggctgccactgctgggtttgtgtaagagaggctgctgccaccattacctgcagaaaccttctcataggggctacgatcggtactgctagggggcacatagcgcccatggatgtggtaggtggggtactcgctcataggatggtaggtatcccgggctggaaagatgtccag

SEQ ID NO: 1211 - DNA, 443 bp, Homo sapien
ccaaggtcagaggctgatgcaacaggccctcttctccccagggccaggctcctgtccagcctgggcactgcccagagtgatggcattggtccggatgctgttctgtctctgcttggacaccttcgcaaagatttctttcaggacagtctcaaaggctagctcaacattggtagagtccagggctgaggtctccaggaagagcagtccattgttttcagcgaacattcgggcctcctcagtgggcacttcccgggcctggctgaggtcacttttgttacccacgagcatgacgacgatcgtggcttcagcatggtcatagagctccttcagccatcgctccaccacagcataggtctggtgcttggttaggtcaaacaccaggagggcccccactgcaccacgatagtacgccgaggtgatggctcggtaccgctccaggccag

SEQ ID NO: 1212 - DNA, 526 bp, Homo sapien
actgaaacccgagtaaatgctcaggctgctgcatatgaatacatggctgcatacatagaaaatgcgaaacaggttggccgccttgaaaatgcaatcgggtggtatcatagccaccctggctatggctgctggctttctgggattgatgttagtactcagatgctcaatcagcagttccaggaaccatttgtagcagtggtgattgatccaacaagaacaatatccgcagggaaagtgaatcttggcgcctttaggacatacccaaagggctacaaacctcctgatgaaggaccttctgagtaccagactattccacttaataaaatagaagattttggtgtacactgcaaacaatattatgccttagaagtctcatatttcaaatcctctttggatcgcaaattgcttgagctgttgtggaataaatactgggtgaatacgttgagttcttctagcttgcttactaatgcagactataccactggtcaggtctttgatttgtctgaaaagttagagcagtcagaag

SEQ ID NO: 1213 - DNA, 359 bp, Homo sapien
  misc_feature (1)...(359): n = A,T,C or G
ccagccattgcctgncatttggtagtatagtatgattctcaccattatttgtcatggaggcagacatacaccagaaatgggggagaaacagtacatatctttctgtctttagtttattgtgtgctggtctaagcaagctgagatcatttgcaatggaaaacacgtaacttgtttaaaagtttttctggtagctttagctttatgctaaaaaaaataatgacattgggtatctatttctttctaagactacattantangaaaataagtcttttcatgcttatgatttagctgttttgtggtaattgctttttaaaggaagnnattaatatcataagttattattaatattgtgaacnca

SEQ ID NO: 1214 - DNA, 428 bp, Homo sapien
ccaagcttgaggcagccctaggtgaggccaagaagcaacttcaggatgagatgctgcggcgggtggatgctgagaacaggctgcagaccatgaaggaggaactggacttccagaagaacatctacagtgaggagctgcgtgagaccaagcgccgtcatgagacccgactggtggagattgacaatgggaagcagcgtgagtttgagagccggctggcggatgcgctgcaggaactgcgggcccagcatgaggaccaggtggagcagtataagaaggagctggagaagacttattctgccaagctggacaatgccaggcagtctgctgagaggaacagcaacctggtgggggctgcccacgaggagctgcagcagtcgcgcatccgcatcgacagcctctctgcccagctcagccagctccagaagcag

SEQ ID NO: 1215 - DNA, 414 bp, Homo sapien; identical to SEQ ID NO: 1005

SEQ ID NO: 1216 - DNA, 162 bp, Homo sapien
  misc_feature (1)...(162): n = A,T,C or G
cctggccgcagggtcccccggtattgctgttgctacgaggttggggggcagcgattgtcctgtgggagccaccgttctcctgggtcggggaccctcacttcttctggggtgtgctcannttctgcatgccccggatcttgtccagcangccagaaatgaagg

SEQ ID NO: 1217 - DNA, 392 bp, Homo sapien
  misc_feature (1)...(392): n = A,T,C or G
ctgaagtagaggctggaactgaagctgagactgaggctgaggctgaaactggagctaagggtgaggctggaactggagctgaggttgaggccagaactggagctaaagttgaggctggaaccggagctgaggttgaggctggaactggagttaaggttgctggaagtggagctgaggttgaggctggaactgaagctgaggttgaaggtggaagtggagccgaagctagaggtggaactgaggctgaagactgtgcttgctggatccctgtagcctgttttttggcaaatcttggaggaagcttanaagtctggcttcttcctttttcatttgcattctttttgttccagaccttaaaaaattaacggggaccatttttgtcaataatgcag

SEQ ID NO: 1218 - DNA, 526 bp, Homo sapien
  misc_feature (1)...(526): n = A,T,C or G
ctgagctttcagcagataaatcacagcagaaatagaatcaccctaggactttcaatcaaaagctggaagtccaccttacagaaagacaaaaagaaacccctttttatatcttaacaaagcaatagctctcaagcagcagagcatctcgaggaagaaagcttgcccggtcgccatcccatcatgccagagcgtgcagtgtccacccttgactacgctggggaattgctgattttttgaaaaagcttaacttaacaatttctgatgtctatcctttagagttctgtatgttcccattttttattcttctgaattttgaattgcaagtagctgtaaaatccaatctttgagtgcatgggggtgggtgtgaggcggggctcancttcaaccccctgtcctgtaaagcagtggctggtttttcctgagcccagccctgggaggtcgtggtangtgtggaggctgcagagctcctncagatgctgccctcgctgtgcctcacaccanagaggatggaagtgggctctggtgt

SEQ ID NO: 1219 - DNA, 382 bp, Homo sapien
ctggccggcggtgcagatctggagtccagcctcagggatgcgctactttccattctctgcattgaacattcgttctgtcagcatccgctccagcttcactgcatcagcggcaaacttgcggatcccgtcagagagcttctccacagccatctggtcctcgttgtgcaaccaacggaaagacttctcatccaggtggattttttccaggtcactggcttgggccgccttggctgagagcacaggcaccagcttggcgttgtcctgcagcagctctcccaggagcttgggtgagatggtgaggaagtcacagccggccagtgctttgatctcgcccgtgttgcggaaggaggcgcccatgacaatggttttgtagctaaacttc

SEQ ID NO: 1220 - DNA, 127 bp, Homo sapien
tcgacctccttgaagcagaccaagtatagcaagcctctaaaaggactactgagaaacagaatcagaaactctagaactctagttagggcccttcagcagggctgcagagcctccctggatacccagg

SEQ ID NO: 1221 - DNA, 304 bp, Homo sapien
ccaccccggagatgacacgaggctcacatgactctagacacttggtggaaagtgaggcgagaaaaacaatgacttgggccaattacacgactgcaaagctagagctgccaacagggctccagggagcttggcttctgtagaagttctaaggaagcggtacgaactccacggcggtggggcgctaactagcagggacccctgcaagtgttggtcgggggcctcgggctgcctgagctgacacgaggggaggggtctgtgtagccaacaggtgaccgaagggcttgcctgcccacagcttacttgg

SEQ ID NO: 1222 - DNA, 309 bp, Homo sapien
ctgtcgcactcgtagctgcaactcactcaacttgtctttagcagcaatttctgcatagtcattggcatgttcacctacctggatgtccgggtgaactctcagcatgcctccagcaaagagggagaacttggtggaattggagtgaagacagatctggtgctcaccaggggtatgggaagtgaaagtgaacctgccctcggagccatactgccgggccaggatgaccttgtcctctgggtcctccacctccacaaacatgccaagccccggggtggccggctggtactcctcccgctgcttgtcatacag

SEQ ID NO: 1223 - DNA, 390 bp, Homo sapien
cctggcctgggagccctgtgcctactagaagcacattagattatccattcactgacagaacaggtcttttttgggtccttcttctccaccacgatatacttgcagtcctccttcttgaagattctttggcagttgtctttgtcataacccacaggtgtagaaacaagggtgcaacatgaaatctctgtttcgtagcaagtgcatgtctcacagttgtcagtctgccactccgagtttattggtgtttgtttcctttgagatccatgcatttcctggttgaatctcctggaactccctcattaggtatgaaatagcatgatgcattgcataaagtcacgaaggtggcaaagatcacaacgctgcccaggagaacattcattgtgataagca

SEQ ID NO: 1224 - DNA, 407 bp, Homo sapien
ccttatgactacaacggcccacgagaaaaatatggaatcgttgattacatgatcgagcagtccgggcctccctccaaggagattctgaccctgaagcaggtccaggagttcctgaaggatggagacgatgtcatcatcatcggggtctttaagggggagagtgacccagcctaccagcaataccaggatgccgctaacaacctgagagaagattacaaatttcaccacactttcagcacagaaatagcaaagttcttgaaagtctcccaggggcagttggttgtaatgcagcctgagaaattccagtccaagtatgagccccggagccacatgatggacgtccagggctccacccaggactcggccatcaaggacttcgtgctgaagtacgccctgcccctggttgg

SEQ ID NO: 1225 - DNA, 250 bp, Homo sapien
ctgcagctttgggcatttttctttttaattattcttcctctgactttgtatcccttaatacctacactctccaattgtaagagaaagggggcagggaagcaatatagcttccattctaaggctgtattcccgttatgaattactagctgattacagttcagagcattgatcctggaatgtgtgctggagaaatttaaaatactggggttttttgtttaatggtgcctgtttagagttggaagttgaacag

SEQ ID NO: 1226 - DNA, 444 bp, Homo sapien
  misc_feature (1)...(444): n = A,T,C or G
cctttaggctgttgctctgggcagggggtgggggtgcgggggcttacagtgggggcccttagttggcacaggttcggaagggccccaggcagacatgaattctcctgagacttgaggtaggttgcttcagccagcccgggcggagaagaagggcagagagcgaacataggagtccagtcgggagcgaaagagctcactttgcacagtttggcccagcgggcacaggggattcttcaccaccagctccacatacagcgcactgtagatgtggtgcagcacatctcggatgggtcccacgcccaagtcagtattcatgacaactttgatcccagtgggcgtctcgtagtaatggagtttgtaacggctagtttggaaggccaggaagccatccttcatgtctagcggggacatcttgctgacaaacgancggatagagaagagcat

SEQ ID NO: 1227 - DNA, 491 bp, Homo sapien
gttagccttacatgttgtgtagacttactttaagtttgcacccttgaaatgtgtcatatcaatttctggattcataatagcaagattagcaaaggataaatgccgaaggtcacttcattctggacacagttggatcaatactgattaagtagaaaatccaagctttgcttgagaacttttgtaacgtggagagtaaaaagtatcggttttattctttgctgatgtcctttctgcttgaaataacagtcaccatacagctaaaggagaggagtttctttccttctaagtaggcagaaatggtatcattatgttgccgctctccaatctcccagagctcgctctctagagaatcaccttctttcgctttttttttttttttgaggtagagtctcactatgttgcccagactagccttgaactcctgggctcaagtgattctccctcctcagcctcccgagtagctggaacgaactatagttgcaccactgcag

SEQ ID NO: 1228 - DNA, 279 bp, Homo sapien
ctgggcggatctgatcaactaggcaacatcatgtccggatatgagttcatcaacaagttgactggagaagatgtatttggaatcaccgttcctctaattacaagtacaactggagcaaagctgggaaagtctgctggcaatgctgtttggctaaacagagataagacatctccatttgaattgtatcaattctttgtcaggcaaccggacgattcagtggaaaggtacctgaagctgttcactttcctaccccttccagagattgatcatatcatgcag

SEQ ID NO: 1229 - DNA, 199 bp, Homo sapien
cggccgaggtccagtccaacctgctcctcattattgtataaatgagcagaatcaatatggcggaagccagcttcaattgccaatttggtggcctctaaagctttacttttaggaacctctgcaggcgcataggtgccaaatcccaggacaggcatgaagtgaccatcattcagcttcacacactgatatttcgaatcca

SEQ ID NO: 1230 - DNA, 237 bp, Homo sapien
  misc_feature (1)...(237): n = A,T,C or G
ctgcattgntgnggaattcacaactactcaggctgggaaaatacagattggttcaaagaaaccaaaaaccagagtgtccctcttagctgctgcagagagactgccagcaattgtaatggcagcctggcccacccttccgacctctatgctgaggggtgtgaggctctagtagtgaagaagctacaagaaatcatgatgcatgtgatctgggccgcactggcatttgcagctattcag

SEQ ID NO: 1231 - DNA, 277 bp, Homo sapien
ctggaggtgcctcagaaggtgcattctgcttcctgcaggggcttgaaacaccaaggcactccagggatcctggagtcaaagcagcagccccggttgttgcactccttgggggtgacatgggggtagccgcagtccaccctgtccttggctggcacggcacactggtttgcagacaggcccacgtactcctcagcagagctggaggacagcaaggccaggaccagccccagcatgcagagcgctctggcagccatgaccaccgtgggctccgggacgc

SEQ ID NO: 1232 - DNA, 348 bp, Homo sapien
ctgcaactttttttttttgcaattacagagtggtattcagttaacagaacaacaattatttcgtataagctgcatcagagacaactgaagatgaaaaaactaccatccccatatataactaatttgtgctgtgcaccaacaagaacctgctttaaatttccatgccaatttacaacccccatactgtaccaggcaaggttagtggctattgaaaataccaccaggacagggctatctaaagacacattcggtagtgtgttaactatacaaaaaaagacactgtacagtttaaaaacaaatcttacacagccttacatttcaatttttttctttaaaaggagtgagttg

SEQ ID NO: 1233 - DNA, 312 bp, Homo sapien
  misc_feature (1)...(312): n = A,T,C or G
ctgagcgtacggccgcgttcatcccagccgcgggtgcccccacgttgatgacagctacgttgcaattggtctttgggatctgatcatccggcagcttgatggcaagtcgcttgtaggtgttcaggttgcccgcaaagctcctccctcggagtcgaaccgnatnttgaaatctcctctcgtccatcgccttctgcacatcctgagtcatctgcacgcactccatcagcggcaggcgcacggngtggttcccgttcagtgacacgacgcaagctggggtgtccggggtggcctctagcaaggcnatgactgcct

SEQ ID NO: 1234 - DNA, 151 bp, Homo sapien
ccggccgcgggcataaaaggcgccaggtgagggcctcgccgctcctcccgcgaatcgcagcttctgagaccagggttgctccgtccgtgctccgcctcgccatgacttcctacagctatcgccagtcgtcggccacgtcgtccttcggagg

SEQ ID NO: 1235 - DNA, 250 bp, Homo sapien
  misc_feature (1)...(250): n = A,T,C or G
ctgcaccttngggcntntttctttttaattattcttcctctgactttgtatcccttaatacctacactctccaattgtaagagaaagggggcagggaagcaatatancttccattctaaggctgtattcccgttatgaattactagctgattacagttcanagcattgatcctggaatgtgtgctgganaaatttaaaatactggggttttttgtttaatggtgcctgtttagagttggaagttgaacag

SEQ ID NO: 1236 - DNA, 154 bp, Homo sapien
ctgatcctcactattgtgggcaccatcgctggcatcgtcattctcagcatgataattgcattgattgtcacagcaagatcaaataacaaaacgaagcatattgaagaagagaacttgattgacgaagactttcaaaatctaaaactgcggtcga

SEQ ID NO: 1237 - DNA, 375 bp, Homo sapien
ccactggatctttgggattaaagctctgttggatttgtacctcagaggaagatcaagtggctgatcctttggactctgtaaagagcattcttctagtcagagggtggaatggcagcagcaactggaagaaaatgagttttttggtgcccacacccaagagcacacacatgctgcactgtctcggaaagcagggccagctagagccaccatgttcttccttacctcagtttacctgcggcctgcgctgcactgcagatgcccaccctgccctgggtctggccggcggaagctctgtccaaggtccacacacctccaggtttacgccaacatccttgtgccctccccaccttctcttccaacgcattaggtgcattg

SEQ ID NO: 1238 - DNA, 454 bp, Homo sapien
gtcaagatcaagttcaatatcatcgcctctctctatgactacaaccccaacctggcaacctacatgaagccagagatgtgggggaagtgcctggactgcatcaatgagctgatggatatcctgtttgcaaatcccaacatttttgttggagagaatattccggaagagagtgagaacctgcacaacgctgaccagccactgcgtgtccgtggctgcatcctaactctggtggaacgaatggatgaagaatttaccaaaataatgcaaaatactgaccctcactccaagagtacgtggagcacttgaaggatgaggcccaggtgtgtgccatcatcgagcgtgtgcagcgctacctggaggagaagggcactaccgaggaggtctgccgcatctacctgctgcgcatcctgcacacctactacaagtttgattacaaggcccatcagcgacagac

SEQ ID NO: 1239 - DNA, 483 bp, Homo sapien
ctgccaggctgaaaagaagcctcagctcccacaccgccctcctcaccgcccttcctcgggagtcacttccactggtggaccacgggcccccagccctgtgtcggccttgtctgtctcagctcaaccacagtctgacaccagagcccacttccatcctctctggtgtgaggcacagcgagggcagcatctggaggagctctgcagcctccacacctaccacgacctcccagggctgggctcaggaaaaaccagccactgctttacaggacagggggttgaagctgagccccgcctcacacccacccccatgcactcaaagattggattttacagctacttgcaattcaaaattcagaagaataaaaaatgggaacatacagaactctaaaagatagacatcagaaattgttaagttaagctttttcaaaaaatcagcaattccccagcgtagtcaagggtggacactgcacgctctggcatgat

SEQ ID NO: 1240 - DNA, 358 bp, Homo sapien
cctttatggatgaaagtacccagtgcttccagaaggtgtcagtacagctcggaaagagaagcatgcaacaattagatccctcaccagctcgaaaactgttgaagcttcagctacagaacccacctgccatacatggatctggatctggatcttgtcagtgactttatgagagtttctgccacaaggtgcccaagaggagaggaatgggaagagtgccccagcacgtggtgactgcgtgatttctgctcratgcctttmtsatamstgaccacactgasggcgaattmcagcacactggcggccgttactagtggatccgagctcggtaccaagcttggcgtaatcatggtcatagctg

SEQ ID NO: 1241 - DNA, 194 bp, Homo sapien
ccaaaggttcgtaatgccatctctgcaccaatctcctcccccatagcaataagggcaatccccagaacagccactccctgatgtgctcccatgtcagcaggggcttccttcttgtccttgtctttcttttccttcttgtctttgtcttcctccttctctttggagtcaaagtgttcgctacaaatgtggagcag

SEQ ID NO: 1242 - DNA, 316 bp, Homo sapien
ccttgttctcactgccctctaagggaacttggtcactcggcacttttaagcctcagtttctccagttcaataataaggacaagagcttttcccatgcattctctttccccgggaaagttgactgaggtgaccagtaatagaattgaaaagggagagtgtcttcagtgcaatgtggcatcctggattgggtcttggaacaaaaacaggacattagtgggaaaattggaaatctgaaaaaagtctgaattttagttaatataccaatttcagtctcttggttttgacagatgtaccatggtgatgtaagatgttgacc

SEQ ID NO: 1243 - DNA, 275 bp, Homo sapien
aaaagggtgatgaaagtattatgtataatattataatggtaaatatgtgatatgaatttgttgaaatcaacagaatatacagcataaagggttaattccaattcacaaaaatataaataaataggagattaggaattccaggatagaatgcagacaatatagaaaatatctaatgtcattacaaatgtatgaaatcagaagaggtgccaagtgacctcagaaatagtgtagtcaataaaagaataaagaaagtgcacgtcagaactgtaccccag

SEQ ID NO: 1244 - DNA, 235 bp, Homo sapien
ctgctgcgcttggataacaagtaattcaacgcacgcacttaacagaaatgttaaactataacaagcaccatttgaggattaacaggaacatttttttgaagatttcaaacgaactcgactttcagtataattgtacctaaagtatttataaacagctcatcggagcctctatttgtcatagacttttgagttgattgttgggaccacataataggaccattttttttttgtcttt

SEQ ID NO: 1245 - DNA, 640 bp, Homo sapien
  misc_feature (1)...(640): n = A,T,C or G
ctgatgatgttccacaaaagagcaaaacatacacaatctggttccactctacagaaatcctggaactggactacaaagggaatagacagggtgtggcaggagggggttcctcacggttggagtgcgaggttagggacaggaatagaaggyaggtaataaacattcatgtggtattaacagggcagatgtgtcaatrtatttscaagtttagcataatataggtataaaaattaaataaaaatagtttakatgtgtgtgtatatatgggttaatacacaacacatacctcctagagtcattacctgagaggttctacaagaaaagacagcaaattaacaaaaaatacacccagaatcaagatttgagttttggttcctttcatagcagaatggtatgcaacatttcttggaaaaatggctaatcctagggcttggaaagagaatataggagtaaagtctacaatttctcatggtacccagaaaataagaaagggttccaaaatgaagaatcgctccttttgcaaaccttatggtaacaaatataatatttataaaaagtgaattangtaatatgttaatggagaaataaacatcattatgaaatgctatcttaacaaaaaatargagaaaatwttagtttt

SEQ ID NO: 1246 - DNA, 509 bp, Homo sapien
aaactttcaaagaatcacttttaggcttacaaaaataaatatttgtcaaaatgttcaataaatattacataaaactagcagcaaaaagtatctagaaatctgtcgtgtgcaaatagttttcttcccaactatcattcccatggtcccaaataaattttagaatctagtcccatccccttcctagacaagctgcgttcaacaatctccaagagacaaagtaagattggaagtttaaggacacgcacacaagacatatatataaaattctctgaatgtgcaataaaagaagtactttgtaaaaagttatgggcaaaatgtacaagggcctaaacctagactaattgaaatagcaccataacaaatgacctcaatactgtcaagtgcacctacttaataaaagttttagaacaaggcacaatacacttgaaaatctattgcactttaggaaatttttgccgtcttcctatgccactgtaaaaagatggagcgttttgatcaccgcattctgg

SEQ ID NO: 1247 - DNA, 310 bp, Homo sapien
catatgtggaactattcttggaaagtctacaaagtgaaatctatcgagttatttctcatttgcaaagtgatcctttgagtcatttctcataatctataatctgaatgttaatactgatatttttaaaagccctacatcccaacagaccaggccatctagatatttcagcgtggtgtctcaggatgagtaaacaaacagctaaaaatatatgacttatgtaaactagagttacaggagttactagcttttctgaaagggatatattctaagtattttttcttaaaaaaaaaaaaargggggggggggggtt

SEQ ID NO: 1248 - DNA, 640 bp, Homo sapien
  misc_feature (1)...(640): n = A,T,C or G
aaagatataaaactatggagaaaactgctaaagggtatccctgacctttatgatgatgcagctattttcgaggccaaaaaatcattttactgggcaagaaaaacatctcattcctttgtcgtgaatatccttgctcaggctctttatgaattattttctgccacagatgattccctgcatcaactaagaaaagcctgttttctttatttcaaacttggtggcgaatgtgttgcgggtcctgttgggctgctttctgtattgtctcctaaccctctagttttaattggacacttctttgctgttgcaatctatgccgtgtatttttgctttaagtcagaaccttggattacaaaacctcgagcccttctcagtagtggtgctgtattgtacaaagcgtgttctgtaatatttcctctaatttactcagaaatgaagtatatggttcattaagcttaaaggggaaccatttgtgaatgaatatttggaacttaccaagtcctaagagacttttggaagaggatatatatagcatagtaccataccacttataaagtggaaactcttggaccaagatttggattaatttgtttttgaagtttttggnatataaatatgtaaatacatgctttaattgcaattt

SEQ ID NO: 1249 - DNA, 1108 bp, Homo sapien
  misc_feature (1)...(1108): n = A,T,C or G
caaaataaatttcaattcaatgaaaagtaaataacttagggatctataaatgacactgcaatgtatcttgttccatttttaacaggaagtccttcatgcaaatgtgtgagtctcccaggatgcatgaagctccagccttttcgtggtgactcaatagagcaattgtaccttacaaatktgcaaccacctccctgaaagtcttctcccacgttattaagtgcaatgyttatggtaaatgtagaagcatcatgatgaggacgaagagaacgctgtcgttcaggggagtattttactacaaaattcagtagtgcaaatcccttcgtataatagcctgcaaagaccttcagtgtaactggtgcaatgaactcccggataaaatgaagccatacattctccagatcaacttgcttcatgtggatatcatcagttgggacattttcataaccaccagatatacggctatcatgatgtttttccccagaccatttgccgtaatgttccatttcttctaccaattcatcacaggnctttttcagaaaatatggggaaccmaaaagacatctggacagggctgttcaamctatattttcagtgaaaatctttgaataatccmcggtttatatacttttccttccagtccacaggattttcaaaaatctgccagaggtcattgttataatgggaagtattgtaattagcagtggataatagccttccaaattcatgtctattagaaatgtacataaatacaccctttggggggctgagcatttggaatgtttccggagtaggggagtctttttccctttgtaaagtcatttctctagcatttcggcaaagagccatatcaggatccagtttatcacgaacaaaatagctcctttcattcatctctgatcggagtgtctttcctttaattaagtacacattagccatatatgggacattccatactcctactctattcccttgaacaatatccacataatcttcagatcgtgcatagtatccatcaggactcaatgctccccagaaattggaccacagctttccatgacgagttacaagaggagcaatgatctttctgttttgttcaatcaaaattttt

SEQ ID NO: 1250 - DNA, 567 bp, Homo sapien
ctgaatattgaactggaagcagcacatcattaggctttatgactgggtgtgtgttgtgtgtatgtaatacataatgtttattgtacagatgtgtggggtttgtgttttatgatacattacagccaaattatttgttggtttatggacatactgccctttcattttttttcttttccagtgtttaggtgatctcaaattaggaaatgcatttaaccatgtaaaagatgagtgctaaagtaagctttttagggccctttgccaataggtagtcattcaatctggtattgatcttttcacaaataacagaactgagaaacttttatatataactgatgatcacataaaacagatttgcataaaattaccatgattgctttatgtttatatttaacttgtatttttgtacaaacaagattgtgtaagatatatttgaagtttcagtgatttaacagtctttccaacttttcatgatttttatgagcacagactttcaagaaaatacttgaaaataaattacattgccttttgtccattaatcagcaaataaaacatggccttaactaaaaa

SEQ ID NO: 1251 - DNA, 655 bp, Homo sapien
  misc_feature (1)...(655): n = A,T,C or G
gaaagaaaccaatttaatgccaccaaacataagcctgctatacctgggaaacaaaaaatctcacacctaaattctagcagagtaaacgattccaactagaatgtactgtatatccatatggcacatttatgactttgtaatatgtaattcataatacaggnttaaggtgtgtggnatggagctaggaaaaccnaaggagnaggaaattatnnaaaagaactgnaggtnaagtataaagtcatatgcctgatttcctcaaaccttttggttttcctcatggcttctggctttatatttttatcacaaaccaagatctaacagggntctttctagaggattattagataagtaacacttgatcattaagcacggatcatgccactcattcatgggtgntctatgttccatgaactctaatagcccaacttatacatggcactccaaggggatgcttcagccagaaagtaaagggctgaaaaagtagaacaatacaaaagccctcgtgtggggggaactgngggctcactcttacttggccttcattcnaaacaggttgggnctttcntgcgangatctctcagggnggtaaaaactttntggntttcaacanaanaggtttggntgaatgattactcggcngacacctaagggatcc

SEQ ID NO: 1252 - DNA, 672 bp, Homo sapien
  misc_feature (1)...(672): n = A,T,C or G
aaantgcaaaaacccagaagaccaataattctgaaacttggcatgagtgtgcccagtcagcagcttgcaaagagaggatgtgtcagttactacaattgctgtactcctttagctgagtccttcaactttctccttcttgccagtaaatactacgttgtaattcatatgactgagatcttagtatcacaggatttttagctcccatgcctccttcaaaattgtttacatggatttgtttctattctctgtaggccatattccaaacacattcacttctaaatccaacacaagtgaaggaccagccaggatgaaacacttcagcaatcattttgttaaaaataacatcctggtcatcaagctaagcataagcacctcttgtataacaattcatcttaaaagcttaaagtacaataataaaaataactgcctgaaaactggaaatgaaatacaacagaaaaactgaagcattagtaatttttgcaagtaacccaggtacagtacatttgatttcatagagggtgttttctgatgtttaaggagagggtagaaggggtaggaaaacttggcaaggaagatggaaacagcacaaccagttattttgcttttaataaagtaaatgtaatgacaggagtagggaggtgacaaacacatcnatatatatttttcttatgg

SEQ ID NO: 1253 - DNA, 644 bp, Homo sapien
  misc_feature (1)...(644): n = A,T,C or G
ccaaatatttgttagaaacttctggtaacttagatggtctggaatacaagttacatgattttggctacagaggagtctcttcccaagagactgctggcataggagcatctgctcacttggttaacttcaaaggaacagatacagtagcaggacttgctctaattaaaaaatattatggaacgaaagatcctgttccaggctattctgttccagcagcagaacacagtaccataacagcttgggggaaagaccatgaaaaagatgcttttgaacatattgtaacacagttttcatcagtgcctgtatctgtggtcagcgatagctatgacatttataatgcgtgtgagaaatatggggtgaagatctaagacatttaatagtatcgagaagtacacagacaccactaataatcagacctgattctggaaaccctcttgacactgtgttaaaggttttggagattttaggtaagaagtttcctgttactgagaactcaaagggttacaagttgctgcccaccttatcttagagttattcaaggggatggagtagatattaataccttacaaagagattgnaganggcatgaaacaaaaaatgyggactattgaaaatattgccttcgttctggcggaggtttgctc

SEQ ID NO: 1254 - DNA, 438 bp, Homo sapien
aaagggcatttgaggggaggattattgctatgaatgaaaaaaatattttagcttagactaagctacctgccttcaaaatagtttagggaccaccaccatattttattttgtttttatttttgaacatttttctaatgatttggagagaaaactatttacaaaaattccacatatcagtgatacaatttcttgctgtcaccaattttttataatagcagagtggcctgttctaagaaggccatattttttaagttatctttcagggtaacatggaaatactataaagttggatgtcaaactttaatatgttttcagtgttctctaattttttggaatttttgtagactttacacctggaaaaaaagatttgtaaaatcaccggaacaattgtgtgctttattttataggtagtggttattagtattacatccccatttt

SEQ ID NO: 1255 - DNA, 519 bp, Homo sapien
caagcacaggggagtttatagttctgatgtctttgacattttccctggaacataccaaaccctagaaatgtttccaagaacacctggaatttggttactccactgccatgtgaccgaccacattcatgctggaatggaaaccacttacaccgttctacaaaatgaagcatcttctgagactcacaggagaatatggaatgtgatctacccaatcacagtcagtgtgattattttattccaaatatctaccaaggaatgaccaggagaataagatcctccgatgttcgcaatggtgtggtgtcaggaggctgcctcttagacaatctccagatgtactgtgatgtgagtttgaaaaagagttcctgaagtaccacatctgggagacatgccactagctgagcttcccaaaagtctaccaagagctgaggaattgtatcttcatccttagcacaaagcaccttaaaaacagtaaaaggagcctctatattccagataaatatagcactgataaagcgacag

SEQ ID NO: 1256 - DNA, 178 bp, Homo sapien
ccatgcaggagttcatgatcctcccagtcggtgcagcaaacttcagggaagccatgcgcattggagcagaggtttaccacaacctgaagaatgtcatcaaggagaaatatgggaaagatgccaccaatgtgggggatgaaggcgggtttgctcccaacatcctggagaataaagaagg

SEQ ID NO: 1257 - DNA, 255 bp, Homo sapien
gggtccacttgctgccccatcattgtatcaccttccttcaatcttttggctgccactctcatgtagggatccacggtgaggaacaaagcttcaagcaggacctctccattttttaagggtgggagctcagatgtcttcaactcaaagtcactattagtaggatagccaacaaagtgcttcttcagggtccatgtcttagtacgaaccatcctgaagctcaggagcccgaaggttccactgcctggggaaggcggc

SEQ ID NO: 1258 - DNA, 630 bp, Homo sapien
aaaactaaaagcatcactgctgaactccagctcagtcttcccattttataatgaggactctgaagtttatagaggtcaaggacttgtccaaagctttagatatgtagtgtctgtgcccttttcctctaagtttctcctagagaatgtgggggctcaggaacagagaaaataaggtgcaaaaagtagaaatgggtggtgtttctcaaagtgtggtccatctgcatcctagtgactggggtgcttgttaaaatgcagattgctgggccttatcccaatctgaccaaatcatctcaggatctaccttttgaacaaacttgcctaggtcaaattcactcttgtggaagtttaagtacttcagaaacaagacagccacagaaggtgcacctgctaatttggtggcttccagtgcctcatctgtaacttctggtgaaatcctgagatgtcttactttacattgtttacatcccataacattccaacatttagaaattcactcgagcttatttttcttacttgtttagcactaaatgaaaatagctccctgaagttaaggagtttatatacagtaattcatgcaagtgtgtaaattaaacagatgactttcccccctaatatctaatgcacagcaag

SEQ ID NO: 1259 - DNA, 159 bp, Homo sapien; identical to SEQ ID NO: 235

SEQ ID NO: 1260 - DNA, 115 bp, Homo sapien
aaaaatactataatttcaaaacttccaaatttcaacagatgccagtgttctctccttttttcatatgggaaaatttctttcaaaattatttgacgcttggacaaaaattccacag

SEQ ID NO: 1261 - DNA, 280 bp, Homo sapien
aaaatattgtttatctttatttattttgtggtaatatagtaagtttttttagaagacaattttcataacttgataaattatagttttgtttgttagaaaagttgctcttaaaagatgtaaatagatgacaaacgatgtaaataattttgtaagaggcctcaaaatgtttatacgtggaaacacacctacatgaaaagcagaaatcggttgctgttttgcttctttttccctcttatttttgtattgtggtcatttcctatgcaaataatggagcaaacag

SEQ ID NO: 1262 - DNA, 144 bp, Homo sapien
aaattatttgatgagttccacttgtatcatggcctacccgaggagaagaggagtttgttaactgggcctatgtagtagcctcatttaccatcgwttgtattactgaccacatatgcttgtcactgggaaagaagcctgtttcag

SEQ ID NO: 1263 - DNA, 487 bp, Homo sapien
aaacatcttgataatttgttgttgagagctgttcattctaaaatgtaatgaaattcagtctagttctgctgataaagatcatcagttttgaaaggttactgattttcctcttccctcttagttttttacccaatatatggagaagagtaatggtcaatcttaacattttgttttaattgtttaataaagctgctgggcagtggtgcagcattcctacctagtgtcataaaagcaaaatacttacatagctttcttaaaatataggaatgacattacatttttaggagaaagtaagttgctttgcaccgcctacttaattcttttccatatattgtgatacaaacttttgaatatggaatcttactatttgaatagaaatgtgtatgtataatatacatacatacataagcatatatgtgtgtgtgtgtgtgtatatatatatatatgcatgctgtgaaacttgactacacaacataaatcacttttt

SEQ ID NO: 1264 - DNA, 250 bp, Homo sapien
ctgcttcaacagagtggcagcaaccaagctggagtccaagccccctgataaaaggcagccaatccttctgtctgtcatcaaacgtttctttacagcattattaaaaaggatcctgaggttgttcttcacagtttctatctcaaaacctggaaagagtttctccacattgtcatagagggcgtgcaggggttcatcccgacagtgatgatatttaaccatttccacggatgcaactttgccatttggcttt

SEQ ID NO: 1265 - DNA, 394 bp, Homo sapien
aaatatttgttccaacctttttcgttggtggcatttatggctttggagcactgtcaggcccatgttcattaccgtgagctcctgtgcatctcctaatttccaaactagcctggaaaacgcctccattgaccatgattggttcatggtcctgtgcatggaacatcatatgttcagggagataaagaactctgatagtggcacctgggtaaaaagtacaatccattatatctggatatcaagatcttttgcagttgaagagaggtattgccacagagaaaattataggagcagaagaaagtcaatgaaagtcaatgatgacactccattaggaaccagaaagatggtatttatttatacatataataggtgtaagagattagaggaagcctgtcac

SEQ ID NO: 1266 - DNA, 229 bp, Homo sapien
ccacagttgtatcatatagcatctctaacatttcatctaggattatctagtatagatcttactatatttggggctatgttgtatacaatgttaacaagaacatatcttctctgcatatatgtgtgaattataaagaaaagcatgagaatgactctaagttcaacaaacatgggtgaatctctatgtgctcccagtgtcctggatgggctccccagcaagccattcctcc

SEQ ID NO: 1267 - DNA, 722 bp, Homo sapien
  misc_feature (1)...(722): n = A,T,C or G
aaatcttatcaactttccaaattttcatactaaaatatattattgtattaatacaaactacagtattatacactacactgtgtaataaataaagaaatataaaaataagacacataaatataaaagttttctaaaactaaaagtacatatgtcagtaagaagggtattaatactgccaggtttgaagacatacagtacaaaaatgttgcacagatctataaactaaaagaaataaaataatactgataggtaaaaatcagctaatgttgttaataaattgggtccataataactaacatttggaaacagttatgagccaaataacaatagcatgtccatgtctgaaatgcaagtacatggataaagcagattagaaaatttccctttcgtttctgtagagaaattctgaaaatcaatcaacataaaatcaataccgaggaattgaaggatgaaatgtcccagtgtttcagtttctctgacagagtcagtggttttaagttttatttgggaattttgatacaagagacaaatcaacaaatgctagttattgtaggccacacattggatgaaggcgggttagagccttgaaaatactgagaaatggcacttacagcacacaggtcttgcttaagggcaaaggagatacaaagcttcatgncatatccttcatatggtaccacatattcaaacaccatcccaacactgatctgatgattttgctg

SEQ ID NO: 1268 - DNA, 407 bp, Homo sapien
gatgacacaagcagctaataaccatttctgggtttctgcctaaccccctaattgtctgttaaagccaattctctgggtgtcccagtgagtggtggctttttttctttccacattggcacattcacttctcccactcttggcatgtaagaaataagcatttacataattggaaaaatctggatttctgatgccaaagggttaaagcttcttggatttcatttcattgatatacagccactattttatttttgatcagtggcctttgggccactgttcagggtactgaccatcagtgtcagcattagggttttggtttttgtttcttttgggtatttcttttttggcacatgtgaatcttgttttgtgtaaaatgaaattactttctcttgttctctgatgatgggttt

SEQ ID NO: 1269 - DNA, 675 bp, Homo sapien
  misc_feature (1)...(675): n = A,T,C or G
ctgaaaaagagtgatcctcaatatcctaactaactggtcctcaactcaagcagagtttcttcactctggcactgtgatcatgaaacttagtagaggggattgtgtgtattttatacaaatttaatacaatgtcttacattgataaaattcttaaagagcaaaactgcattttatttctgcatccacattccaatcatattagaactaagatatttatctatgaagatataaatggtgcagagagactttcatctgtggattgcgttgtttcttagggttcctagcactgatgcctgcacaagcatgtgatatgtgaaataaaatggattcttctatagctaaatgagttccctctggggagagttctggtactgcaatcacaatgccagatggtgtttatgggctatttgtgtaagtaagtggtaagatgctatgaagtaagtgtgtttgttttcatcttatggaaactcttgatgcatgtgcttttgtatggaataaattttggtgcaatatgatgtcattcaactttgcattgaattgaaattttgggtggatttatatgtattataccctgtcacgcttctagttgcttcaaccatttataccattttgnacatatttttacttgnaaatatttacctgncccggccggccgtcgaaagggcgaaattcaac

SEQ ID NO: 1270 - DNA, 268 bp, Homo sapien
ccatcctgggcggagctaaagttgcagacaagatccagctcatcaataatatgctggacaaagtcaatgagatgattattggtggtggaatggcttttaccttccttaaggtgctcaacaacatggagattggcacttctctgtttgatgaagagggagccaagattgtcaaagacctaatgtccaaagctgagaagaatggtgtgaagattaccttgcctgttgactttgtcactgctgacaagtttgatgagaatgccaagactgg

SEQ ID NO: 1271 - DNA, 307 bp, Homo sapien
cctactcttctccgtccattgtactatctgcccgtggtggggatggcagtaggatcatatttgatgacttccgagaagcatattattggcttcgtcataatactccagaggatgcgaaggtcatgtcctggtgggattatggctatcagattacagctatggcaaaccgaacaattttagtggacaataacacatggaataatacccatatttctcgagtagggcaggcaatggcgtccacagaggaaaaagcctatgagatcatgagggagctcgatgtcagctatgtgctggtcatttttggagg

SEQ ID NO: 1272 - DNA, 798 bp, Homo sapien
  misc_feature (1)...(798): n = A,T,C or G
ccattgctagaaattgaatcacaaataatagctaataatttttcatttttcaaaaaagatcatttggatagcagctatgtataaaatggaaaataaaaaattattctattttgcatgaatagttcagactttcccataccacagccaagcagtaactaaaattaggatcttaattttcaatgataaaaggtctaaggttcatttaattatgctcctttaacactgtctttctagatttttcacccagtattttcaaaatttgggaatgtaaacaattgatatatttattgtatgttggctagcagttcatccttctgcaaaatatgcattcagagaaatgtgaagcttgttttaatgaagacttaaaccatttgtgtcatttgtgttttcatattcaaatacaccaaattaaaattctgaacctatatttttcatcattaacttcctaatataccagaacatatacctttttcatgtaaagttggcaatgggatatggcagttttatttttgaaaaatatgtaacatgactttaatatttttatagttttcagaattagaaacataggaagggaaaatgttttaattagataagtcaactttttatgggctgnagtggngactataatagcaaattataaagcattattaaatggttataataattttaatattacctcattatgaattaactaaaataaagnggagtgatatttttaatgggtgntcatactggagctcctgagatatatgatttgctattgactcactggntgattgaataatatattactcgcgg

SEQ ID NO: 1273 - DNA, 664 bp, Homo sapien
  misc_feature (1)...(664): n = A,T,C or G
aaaatataccttttcacaggtagcaagaaatagtacatgtaataagtctttatgactggaatgatccagaaatatcacaaagcatgagtaaacacatatataaaagtagctcatcatttccaaaagttaacctttagcctttgtgtaaaataaatggtgccaacaatctttataatgtagcaagctttccctgtttaatatccaaaaaatggagggtggggaggttgaagaaaaataagaaaagttagcaaataagatagtgaaaagaccaatgcagagaaaagtttatgtaatcaaatcttgctttgtctccacattatcacattttaagtggataaatttatgtaaacagaaaaagatgtccacaaaaccatatctatagatgtcatttggaagcatcaagaaattgataagtatgtggtgaattaaaattacttttataatgttttgctttcattaatgtttgttattgcaaaaatgtaagatttcctacaattttgtcttcaaatcccaatctagcccttcaaacttttatccaggttctccagaatatttggagtctttgttatcaaagcacaaggaaagctggcattcattatcagacttcgctgctttacaatganttcaaatcatttcatgatacaaataaagtgcctctgactgg

SEQ ID NO: 1274 - DNA, 153 bp, Homo sapien; identical to SEQ ID NO: 239

SEQ ID NO: 1275 - DNA, 504 bp, Homo sapien
aaaattctgataaaaatttactcaattacattttatacattaatatttagtgaatttgtccaaaaaggctatgtttaatttatgtgtaaaaataacaaaagatgtatcagtcagtctctgggcaataagaaaggaagaaagccttgctagaaataataaataatctcacgcaaaaggccaggtgacataagaatactacaataatcaatatgttttctttgtatttacaataaaatccatctgttaacactgtgatagaaaaaataatcagtccacatcatgtaataaaaacaggctttgaggatgattatacctcttataataaaaacatacaaggatttctcacagctaaagtacttttcaactttgacaactaatgacagtcatgggtgaaggtaaaactgacagagtactttagatcagctatgtcctacagtcaaggaatcaagggcattacccatttaccaagcagcaaaaagcactttcatttttccagaactattt

SEQ ID NO: 1276 - DNA, 533 bp, Homo sapien
gacaatgatgtcactgtttggagcccccagggcaggattcatcaaattgaatatgcaatggaagctgttaaacaaggttcagccacagttggtctgaaatcaaaaactcatgcagttttggttgcattgaaaagggcgcaatcagagcttgcagctcatcagaaaaaaattctccatgttgacaaccatattggtatctcaattgcggggcttactgctgatgctagactgttatgtaattttatgcgtcaggagtgtttggattccagatttgtattcgatagaccactgcctgtgtctcgtcttgtatctctaattggaagcaagacccagataccaacacaacgatatggccggagaccatatggtgttggtctccttattgctggttatgatgatatgggccctcacattttccaaacctgtccatctgctaactattttgactgcagagccatgtccattggagcccgttcccaatcagctcgtacttacttggagagacatatgtctgaatttatggagtgtaattt

SEQ ID NO: 1277 - DNA, 78 bp, Homo sapien
ccacaggaagttgcaaaaattagatggactctgtgtagctagccactcttgagtgtcaggtctgcatatgtgagtttt

SEQ ID NO: 1278 - DNA, 560 bp, Homo sapien
aaatatctaaaacaatggcccactgaagaaaggaacaattaactctttaattaattccttaggataagtacccagaaatttaacagctagggcagacttctaatacaataccgaaagtccttccaaaaaccaagtggttgccaacttatgtcccttagcattataacattcttgagccaatagtgtaaaaatacgctgacaattttataggcaaacattactcaaggtatcttactttccacttattactaaagtaattaacccctaaatagatgctcctcaacagtgggactacatcctggtaaacctatcataagttgaaactatcaagttgaaatgcatttagtacccggataaacctatcataaagttgaaaatttgtaaattgaaccagtgtaaatcagaggccatcttacttcatactcatgaagcaactatagtgggatatttttcaacttacgagatagcctaggcttgttgaaacactgtcctaatttactggctctctggtaattaagtcataaatggtcaaacatcaaattctagaaaagcatatattt

SEQ ID NO: 1279 - DNA, 580 bp, Homo sapien
aaaggagattgtttcaaaatatttttgcaaattgagataaggacagaaagattgagaaacattgtatattttgcaaaaacaagatgtttgtagctgtttcagagagagtacggtatatttatggtaattttatccactagcaaatcttgatttagtttgatagtgtgtggaattttattttgaaggataagaccatgggaaaattgtggtaaagactgtttgtacccttcatgaaataattctgaagttgccatcagttttactaatcttctgtgaaatgcatagatatgcgcatgttcaactttttattgtggtcttataattaaatgtaaaattgaaaattcatttgctgtttcaaagtgtgatatctttcacaatagcctttttatagtcagtaattcagaataatcaagttcatatggataaatgcatttttatttcctatttctttagggagtgctacaaatgtttgtcacttaaatttcaagtttctgttttaatagttaactgactatagattgttttctatgccatgtatgtgccacttctgagagtagtaaatgactctttgctacatttt

SEQ ID NO: 1280 - DNA, 307 bp, Homo sapien
aaacacatacgaagaaatcaactgtgattatgaagtggcagccagctaaatatgtcttgtatttgctctcttcctttttttgcctaactcatcctttacttccattcctgcttccatggtaatgcaggctcaaataaattactaggatacaagattacttcaagcctcttttctgtggaactcataatatgataagcatttgttacaagattgcctgtagttgtttaggggataaattatattagggaaagaaagtctttctttagttggttaaattttctattataattgggtactaaatttattt

SEQ ID NO: 1281 - DNA, 235 bp, Homo sapien
aaaatattttaatagttacatagcactttagtttgctgatttaatttatcccaagggacaaggatgttaatgagaaaactgactagatttcagatcacagattttaagagaacaaggatctcaaaaccaaataccctctgcttaaagtgttttttgtgtttttcactactgaaaatgtttagagattgacttacctattgctgatactcaaaacatctgatatcttaatattttt

SEQ ID NO: 1282 - DNA, 230 bp, Homo sapien
  misc_feature (1)...(230): n = A,T,C or G
aaagaatttctttataagattkactgtmtaagattaatagcattcgaagatccccagacttcatagaatactcagggaaagcatttacctcsgtcgctgaccackctargggcsawggccagcacactggcggccgttactagtggatccgagctcggtaccaagcttggcgtaatcatggtcatagctgattnctgtgaggtaccagattgcctgtagttgtttagggg

SEQ ID NO: 1283 - DNA, 638 bp, Homo sapien
aaacacaacagctataaacctgaacacatatgctatcatcatgccataagactaaaacaattatatttagcgacaagtagaaaggattaaatagtcaaatacaagaatgaaaaacgcagtacatagtgtcgcgaactcaaatcggcatttagatagatccagtggtttaaacggcacgtttttgcttataaaaaaagtgcaaaaaagatgtggtttacaagttaaagctacagaatccctttttgctgtaattgcaccagttttaaagcctctggacagagcagtatttcgtttaaaactttgttyttcttaaaagcttacagtgtttggctaattctcctcycctttttacaagacgggggccggagggtggacactggtggcaggttaagggatactgtcactttaagaagcctgcagattgaagtgtaaacatggagaaattaggggctgattttttaaactgtgtgagatattaaccagccgccctgttataaaatcaggaaatccaaacagcgatttacaccgattaacaccccctttatatattttttacaaaaatacactgagaaaataatcaaacgttttcatctctcttgtctttttttgttttttaaaagtgtcaaaagtctacattt

SEQ ID NO: 1284 - DNA, 745 bp, Homo sapien
  misc_feature (1)...(745): n = A,T,C or G
cgacggtatcgataagcttgatatcgaattcctgcagcccgggggatccactagttttgaatttacaccaagaacttctcaataaaagaaaatcatgaatgctccacaatttcaacataccacaagagaagttaatttcttaacattgtgttctatgattatttgtaagaccttcaccaagttctgatatcttttaaagacatagttcaaaattgcttttgaaaatctgtattcttgaaaatatccttgttgtgtattaggtttttaaataccagctaaaggattacctcactgagtcatcagtaccctcctattcagctccccaagatgatgtgtttttgcttaccctaagagaggttttcttcttatttttagataattcaagtgcttagataaattatgttttctttaagtgtttatggtaaactcttttaaagaaaatttaatatgttatagctgaatctttttggtaactttaaatctttatcatagactctgtacatatgttcaaattagctgcttgcctgatgtgtgtatcatcggtgggatgacagaacaaacatatttatgatcatgaataatgtgctttgtaaaaagatttcaagttattaggaagcatactctgttttttaatcatgtataatattccatgatacttttatagaacaattctggcttcaggaaagtctagaagcaatatttcttcaaataaaanggggttaaactttaaaaaaaaaaaaaaaaa

SEQ ID NO: 1285 - DNA, 190 bp, Homo sapien
cgacggtatcgataagcttgatatcgaattcctgcagcccgggggatccactagttattaatagtaatcaattacggggtcattagttcatagcccatatatggagttccgcgttacataacttacggtaaatggccgccaccgcggtggagctccagcttttgttccctttagtgagggttaattgcgc

SEQ ID NO: 1286 - DNA, 153 bp, Homo sapien
ctgcatctttctacaattctaccagcaatatatgagggttacaatttctcyccatctttgtgaacgcttgttagagtctgtcctcttttcttccattctgtgggttggctttttactttctaaatggtagaaccttcaaagcacaaaggtttt

SEQ ID NO: 1287 - DNA, 232 bp, Homo sapien
aaaaacacaaaacactagaacagttgctatgaaattactgataatgatccctttaataaactgcaattaaccactaatatagaaattcaatttaagcaagaagttttatatattatactttacagaaaaaaataattttgaaaaagtaatgmcaaacagagatcaaacatttagggcattagttactgcattctctttttagaatatacattaagtaacactagtaaaattt

SEQ ID NO: 1288 - DNA, 90 bp, Homo sapien
aaacttagtgactatttagttcaattgytcatccattttttatttgcttttataattgcctccttgttttggtatattgtaaaataattt

SEQ ID NO: 1289 - DNA, 670 bp, Homo sapien
aaatcacaaagtaaggcaccattggattaaacatttctcctggcttttactaagtaaaatgcatagtgaaataaatactgaacactgagttttaatactgtaatacatttcaatataaaataagaggtgaatgttaaaatactgtattacatgttgaatacatttatctgaaaatgttataaaaaaacacacatgtaagctctgatttcagggaagaaaaattcatttttgtaattttccatagtttaagattttaccacagaacttattcatagttttagatgcaattaggttgcaaactttcaaagaaagggtgtaggtgtattaatgaaacagtcacttaaacactacattctaaaacaatctattctggatgaatggcaactttgagctatcaccctgtttcagatttagaacggtacctgccaagttcagatatgcaaaggaattgtccaattcttactaccccttataaaattcagactcactttctctgagtcagacttttctccgtcatattttctaggaagggcaaattccatcttttgtgaaatgggtcattaggctttatcatagggatgtttttcactgttgaaatcagataaaagaatcccaaataaatgatgctgctaaattaccaaactgctagagattaaaaaaattttttttt

SEQ ID NO: 1290 - DNA, 352 bp, Homo sapien
aaacaatgctacacccatttttggcaaagtgctgtattgttcagtctgtgtacaaaactgaccatctatgaaccaatcagtataaaaaatttctataaaaacaaaatttagacagtggctcaagaaaacaagctgccatttatgcatagattgatgtacagtaacctaaccaaatgtcccttttgaattttcaagttactgaaaaaaaatgtgtcgagaaacacattaagaaggcacatgtacagtctacaatactcttcagtctccctaactcatgccctgcccctataaaggaaatatgttcacaattttacttgagaaaaaaaaacaaagccacttaaaaaaaaaaaaa

SEQ ID NO: 1291 - DNA, 99 bp, Homo sapien
aaaaattatttaaggtaatggtgttacgaatggtttaaaaatgtctggtgacttgcttatttttaagtgatcaccattaagtcagaaaaatgtattttt

SEQ ID NO: 1292 - DNA, 295 bp, Homo sapien
aaatatacctttatttctcaaactcaaagctttatcaagttctaacacattttgcattgacaagtgattttatctgcatcaagtaaggttagtgaccaccacgaaagaggaatccccagacctcctaggcactaagaaatatttcaaaggctatgcaaatatagaacaaaaagctttcaatttagtctaattggtatctatttttcatctatattaatttggaaataagttgctaccttagaaaaattacatttttatccattaaaataaaacaccagataggttgagttttttt

SEQ ID NO: 1293 - DNA, 256 bp, Homo sapien
agattcacttcaaagtgaaaatgacaacacatctcaagaaactcaaagaatcatactgtcaaagacagggtgttccaatgaattcactcaggtttctctttgagggtcagagaattgctgataatcatactccaaaggaactgggaatggaggaagaagatgtgattgaagtttatcaggaacaaacggggggtcattcaacagtttagatgttctttttattttttttcttttccctcaatccttttttattttt

SEQ ID NO: 1294 - DNA, 90 bp, Homo sapien
aaaatacttagctttattaaagacatggtactaaaaataacagattccaacatttgctctatttctacttatatatcataaataagacag

SEQ ID NO: 1295 - DNA, 519 bp, Homo sapien
ctgtcgctttatcagtgctatatttatctggaatatagaggctccttttactgtttttaaggtgctttgtgctaaggatgaagatacaattcctcagctcttggtagacttttgggaagctcagctagtggcatgtctcccagatgtggtacttcaggaactctttttcaaactcacatcacagtacatctggagattgtctaagaggcagcctcctgacaccacaccattgcgaacatcggaggatcttattctcctggtcattccttggtagatatttggaataaaataatcacactgactgtgattgggtagatcacattccatattctcctgtgagtctcagaagatgcttcattttgtagaacggtgtaagtggtttccattccagcatgaatgtggtcggtcacatggcagtggagtaaccaaattccaggtgttcttggaaacatttctagggtttggtatgttccagggaaaatgtcaaagacatcagaactataaactcccctgtgcttg

SEQ ID NO: 1296 - DNA, 419 bp, Homo sapien
aaagcaaacagcagaaaccagaagcttctgaccctctaacatgtattactgtccaacccaccatgagaagtatgttcacttggtgacaacaaagagactccgtatcatatgtatgttaatgaccagattgttcatatgggatttttcttaacagattatcaggttgagaatgattctttttctccaagggcaagaaaaagctggctaaatgctagttaattaaatccattctcaattttgaactgtagagaagaacctgacttgaatgagattttctaaaggaagacatttcttgctcaacctcaggtataattagattataaggaatctcacgtccagaattttatctgctgattgttagtatggtaggtaattggccttaggacactatttctactagaaccctttacattattttt

SEQ ID NO: 1297 - DNA, 199 bp, Homo sapien
caggtctgaagattttacatgcagataccagataccttaacttgtatttctttagtcatcttttggcttggaagtttcctctgttgtctttgctgaatccttcgctttacctccattcttaggtgctttggagctggaagcagccttcttgcacttatcctttgctgtgttctgtgaggtttctgtagtggagggacag

SEQ ID NO: 1298 - DNA, 484 bp, Homo sapien
  misc_feature (1)...(484): n = A,T,C or G
aaatacacttgaaaagtaaaatgtttttctagcttttccctcagggcgtaacaccacaccattcataacaatgctattttccaaaggtttcaattagatttcctcagaagcatacctgaactgttaatcattacaactcctttgtgaaacatgggactggttgattacccagtgtaatcactggctgaaacctcagcacactgtttttcaccccagtggaggcaggttttcacctcccctctagctgtacccctctcttaatgcccatattagagaactgtgatcttctttctccactagaaatgttcactttcatcaggtaagggataaaacaaaaacaagagacagaagatcttaaaaaaaaaaatagtaatagggcaagtaaactcagtgaggttagaggaatttgtttggggggcattctatgttgttagytncatatcatgttcagtttgntggttctaganccctctgaaatgcatta

SEQ ID NO: 1299 - DNA, 419 bp, Homo sapien
aaagtccatctttgcaaattatacgttgctataaatacattgtgtatttggcattatgtgaatttgtttaatccagtgtcaattgtctaatggtctaaagtgtcccattgaagttataatctggatgaactgaacaataagagaagttttcttcattagcccaattgtttatcactcaattcctactcctgcccatggtttcttccaccttcctctggagaacataaagagattctagatctctgtataaggtggtttgctttagcttgaaatcatcagtgaggattatacatgggcaatgtccagaaatcacattattgctcatagaccgtgtagtcttgatctaacggataactgtacattgtcttcactaagaagctagggtggttgtccttgatattgggacattgtagacttgg

SEQ ID NO: 1300 - DNA, 182 bp, Homo sapien
  misc_feature (1)...(182): n = A,T,C or G
ccntngaattgtgtgcatagggaagcactcacccaatgagactttctccaatgtggactctgtgtgtcagggaatgaatgtagaaaaattcactttggagggttatcakctcaactagtaagaagcattaatattattaaagtgaagaaactgcagagaaaattacagaacaaaactgtagg

SEQ ID NO: 1301 - DNA, 312 bp, Homo sapien
aaagtttttatctctgctgaggcttcacatctgtttgctcaattttatttttatttcaatccttgagcatgtttataatatagtagtatccccttattgtggctttactttcctcactttcagtcacccacagtcaaaaaatatgaaatataaaactccagaagtaaacagtttataaattttaagtcacactttgttctgaggaatgtgatgcaacctcccgccattctgctgtatccagttcaggatgtgacatacccctttgctcagcagatacacaattcctgcttcctgctcattagacatttgcag

SEQ ID NO: 1302 - DNA, 109 bp, Homo sapien
attcttagattatatgtgtccatctttgcagctttctgagagtaattttatttgttgtcttctgaaatgtacatgtatacatgtacctactgagtgctatgtgattttt

SEQ ID NO: 1303 - DNA, 330 bp, Homo sapien
ccagagttacttggatcagcatttaggaaagtaaaatatagtggaagtaaaactgactcatccaactagacattctacagaaagaaaaatgcattattgacgaactggctacagtaccatgcctctcagccagcccgtgtgtataatatgaagaccaaatgatagaactgtactgttttctgggccagtgagccagaaattgattaaggctttctttggtaggtaaatctagagtttatacagtgtacatgtacatagtaaagtatttttgattaacaatgtattttaataacatatctaaagtcatcatgaactggcttgtacattttt

SEQ ID NO: 1304 - DNA, 170 bp, Homo sapien
ccactgtagtctgcatatccctgtccatatccatagttcccatagttatacccagtataatcatatccgccatagccactatagttttgatcaccaccataggcactattgtaatttccatatccttgatcataatagttattaaatccttggttccagttttggccctg

SEQ ID NO: 1305 - DNA, 468 bp, Homo sapien
aaaaataaatatttatactccagcttttgtgtatttggtgtacatcaccacttatgcaaatcaaggatcagaaaactggaggttagccatctccattatttccttttgcacattgggtacagtgggtggcattagtatgcactagctgcaaagtcacagcaccttatggaaataagtatgtttattataataaaaaaaagttaagctgcatctctgtagattatttactttgcagactgtaaagctgccctatcttttccagcagaatttactcttccattcttaattcttttttgaaatatcttaaataatttaacattcctttataacttcttaacagtgtcaaaactggggtagaagggattttattttttcccaaaagggttccatctttgctatctgttgatcagccttagaaaatctaagtatgatcaataaattttaatggttgatggcatcctgtgtcag

SEQ ID NO: 1306 - DNA, 326 bp, Homo sapien
tggtaaagaactacctgttaatgcacaaaactatgtgcgatttattgaagatgagcttcaaattccagttaagtggattggtgttggtaaatccagagaatctatgattcaactcttttaatgattgccagtaatgcaagaaacactccttgagagggaggggaaaagactttcttaaatatttcatttatgacctgcaaattcaagaataaagacactgaagtaagtttgaagccctacagytgtttccagtcttttcagatggatgcctactgtggagattaactttggcatattccagtgtcagctttctttagctggaattg

SEQ ID NO: 1307 - DNA, 614 bp, Homo sapien
  misc_feature (1)...(614): n = A,T,C or G
aaaaattattactgtaagaaatagttttataaaaaattatatttttattcagtaatttaattttgtaaatgccaaatgaaaaacgttttttgctgctatggtcttagcctgtagacatgctgctagtatcagaggggcagtagagcttggacagaaagaaaagaaacttggtgttaggtaattgactatgcactagtacttcagactttttaattttatatatatatacattttttttccttctgcaatacatttgaaaacttgtttgggagactctgcattttttattgcggnttttttgttattgttggtttatacaagcatgcgttgcacttcttttttgggagatgcgygtytgytgatgttctatgttttgttttgagtgtaggctgactgttttataatttggggagttctgcatttgatccgcatcccctgtggnttctaaaggggatggncctcagnaactgttgcatggatcctgtgtttgcaactggggaggacagaaactgggggtgatagccagtcctgccttaagaacatttgatgcaaagaatgggaccctgccccggggccgggncccctccgaaangggggggaaaatcccangcacc

SEQ ID NO: 1308 - DNA, 304 bp, Homo sapien
ctgtcttttggaggacgtacgtaataaggttttaatttagtaaaccaatcctatgcatagtttcagcactagccaaacctcaccaactcctagttctagaaaaacaggcacttggcagccttgtgatgtcatacagagaagtcacaggcagtacctgagggtctgtaggttgcacactttggtaccagataactttttttttctttataagaaagcctgagtactccacactgcacaataactcctcccagggttttaactttgttttattttcaaaaccaggtccaatgagctttctgagcag

SEQ ID NO: 1309 - DNA, 289 bp, Homo sapien
gggatttccaattaacagtattaccagataaatattcttggtccaagcagaaaatatcaacaaaaagagccttcttctcctgtaaatcttaaatgcctacatcactctttatgatacatggatcatcttatgtggatacttaaatttttcatgtctgcttcttttgcctctcccaactatactatgaggaaattcggaacaaagacatttttgtaatatttcttatctccttcacacctagtatagagctgattttacaaaggcatttaagagatatttgaattgattt

SEQ ID NO: 1310 - DNA, 534 bp, Homo sapien
  misc_feature (1)...(534): n = A,T,C or G
tgctttgcattttctgatgtattacatgactgtttcttttgtaaagagaatcaactaggtatttaagactgataattttacaatttatatgcttcacatagcatgtcaacttttgactaagaattttgttttacttttttaacatgtgttaaacagagaaagggtccatgaaggaaagtgtatgagttgcatttgtaaaaatgagactttttcagtggaactctaaaccttgtgatgactactaacaaatgtaaaattatgagtgattaagaaaacattgctttgtggttatcactttaagytttgacacctagattatagtcttagtaatagcatccactggaaaaggtgaaaatgttttattcagcatttaacttacatttgtactttagagtatttttgtataaaatccatagatttattttacatttagagtatttacactattgataaagtttgtaaataattttctaagacagnttttatatangctacagggtgccctgattttcttattgaatttggttagactag

SEQ ID NO: 1311 - DNA, 114 bp, Homo sapien
aaaatttgtaggagttgtagactacctaaatttttaagttatggyatttggtcataggttgactgggtaggtaaagaaggaaacagacaagaaaatggcttcttgaggtggcag

SEQ ID NO: 1312 - DNA, 95 bp, Homo sapien
gggcgggtaaaggtaggccgcgagagcgaggttaggagaggataggaggccgcagtactgctcacacgctccgctcttctcccactctcgactct

SEQ ID NO: 1313 - DNA, 519 bp, Homo sapien
aaatgatacagtattttaggtatgatttaagactatgatttacctatacattatatatattttataaagatactaaaccagcatacccttactctgccagagtagtgaagctaattaaacacgtttggtttctgaataaattgaactaaatccaaactatttcctaaaatcacaggacattaaggaccaatagcatctgtgccagagatgtactgttattagctgggaagaccaattctaacagcaaataacagtctgagactcctcatacctcagtggttagaagcatgtctctcttgagctacagtagaggggaagggattgttgtgtagtcaagtcaccatgctgaatgtacactgattcctttatgatgactgcttaactccccactgcctgtcccagagaggctttccaatgtagctcagtaattcctgttactttacagacaggaaagttccagaaactttaagaacaaactctgaaagacctatgagcaaatgggctgaatacttttttttt

SEQ ID NO: 1314 - DNA, 518 bp, Homo sapien
  misc_feature (1)...(518): n = A,T,C or G
ccatggtgggtgaagacgctgatctgccctgtcacctggggttttttatgagtgcagagaccagggagctgaggaaacccgagytccagcctaaggcaggtggtgaacgtgtatgcagatggaaaggaagtggaagacaggcagagtgcaccgtatcgagggagaacttcgattctgcgggatggcatcactgcagggaaggctgctctccgaatacacaacgtcacagcctctgacagtggaaagnacttgtgttatttccaagatggngacttctacgaaaaagccctggtggagctgaaggttgcaggtgagcctccaggttttgntctgagaacacttctctgtaggatctanagcagatgcagagtccctcttccaaaagtactgcagacactcctggctgctcactagcaatngtctgcactgcctcccaactnagcttctctgcaacccttaagaaagacacattctttctttagaaagaattcctgctgnaccttacatgccgaagtaaa

SEQ ID NO: 1315 - DNA, 360 bp, Homo sapien
tctgtgcatccaatttattatagwtttgtaagtaacaatatgtaatcaaacttctaggtgacttgagagtggaacctcctatatcattatttagcaccgtttgtgacagtaaccatttcagtgtattgtttattataccacttatatcaacttatttttcaccagkataawatcttratttytacgacctatcattctgaatcaagmacactgtatgttcagtaggttgaactatgaacactgtcatcaatgttcagttcaaaagcctgaaagtttagatctagaagctggtaaaaatgacaatatcaatcacattaggggaaccattgttgtcttcacttaatccatttagcactattt

SEQ ID NO: 1316 - DNA, 277 bp, Homo sapien
aaaaaacacgtttgttattaccaaawagagacggctttaggtaaaaataataaaaaccctttgcttgyattacytatgcaratagttstatttatctggwcwacgggytaaaggyacagyactataggwctctggcttgagtmtttacgttcatttcttattgctggaatktcatatttcttcttgttggatgactaaaccggatgatggtagagatggtaagccggcatttactcagccccgccctgctcagcctcgggagcggacgaattctcag

SEQ ID NO: 1317 - DNA, 716 bp, Homo sapien
aaaatgttctcttgagactagtaggcatagaagaaagcagaaggaaaataaatagaaagaaggtcttctaccttcatggctattcaggctcaggagggtggagagaaaaagaaggaggacaaatgaacaagacagatgagggagacatcctctctgatataagatacagtcctctctggtggatggagtccaatttgtgtaacttcctatgtattttcctagataggaccaccactatttgagaaaatatctcactggtaacctaaagccaaggataataaaccttgatatacttaacattcaatttctttccagcaatgtgataaataaatctatcttgtgtttctcttgcagattgtaaaagcattagaacatttacatagtaagctgtctgtcattcacagaggtaagcatccatgagctgccttggctgttcctttgataaagttcatctctttcacctggagtccgtctctacccccagtcccccatgggtggaagtagaattgactcaggcaagagaactaaggggctttcctttgagattggatagcaaaccatataagtagtattccttatcatggctgaggacataagaagaagacgtgatctttgtcttacatccaaattgaatataaacacttggtagcaagcagagctatgagatcatatcattgagaattttagagaatatgataaaaattgatcttgtctgg

SEQ ID NO: 1318 - DNA, 515 bp, Homo sapien
aaagctgtatcatgttgagtaaacctgacctgagccagcggtttaaggcgattttgctcgatgaaggtcaagacgtgaacccggtcattgccgacttggtaaggatacagcgcatctgcaaagtaaccgtcggcgaccctcaccagcagatttaccgtttccgtggtgccgaagacgctctcaacagcgattggatggccgatgcagagcgtcactacctgacccagagctttcgcttcggtccagcagtcgcgcatgtggctaacatcatacttttttacaagggtgaaactcgaaagctgcaagggttaggccccaaaacccaggttaaacgtgcgcttcctgaagacctaccgcatcgcacatacatccatcgcacggttaccggcgtcatagagaacgcgcttagcttggtagcgagcaatccaaagatctattgggtaggtggcatcgacagttattcattgcgcgacctggaagacttgtatctgttcagccgcaaccaaaaccaagcc

SEQ ID NO: 1319 - DNA, 141 bp, Homo sapien
aaatttagtgtctcatttggaaataaactctgggcctattagttgttgagtattttttttttttactacctaaaaaaagatttgttaagagctgaattacaacttagcattacataatataaaacactgtaatgtgtattt

SEQ ID NO: 1320 - DNA, 497 bp, Homo sapien
aaattcagtcctaagaaagaggagtgcttgtcccctaagggtgtttaatggcaaggcagccctgtctgaaggacacttcctgcctaagggagagtggtatttgcagactagaattctagtgctgctgaagatgaatcaatgggaaatactactcctgtaattcctacctccctgcaaccaactacaaccaagctctctgcatctactcccaagtatggggttcaagagagtaatgggtttcatatttcttatcaccacagtaagttcctactaggcaaaatgagagggcagtgtttcctttttggtacttattactgctaagtatttcccagcacatgaaaccttattttttcccaaagccagaaccagatgagtaaaggagtaagaaccttgcctgaacatccttccttcccacccatcgctgtgtgttagttcccaacatcgaatgtgtacaacttaagttggtcctttacactcaggctttcactatttccttt

SEQ ID NO: 1321 - DNA, 344 bp, Homo sapien; identical to SEQ ID NO: 1148

SEQ ID NO: 1322 - DNA, 110 bp, Homo sapien
ccaccacatagccagccaggaatcccttgaggaacggggaggacaacagcgagccaccctggcccactccactgttgacttcgtcttctacacgccgctgcaggctttcc

SEQ ID NO: 1323 - DNA, 359 bp, Homo sapien
ccacgctgctggcctgggctggcgtctcctgctgtgagctggctgaggaggacttcctggcggtctcccccttagatccgcgctatcgtgaggtccactatgtcctgctggatccttcctgcagtggctcgggtgagatggtgagaaggcgtggctgagggactcagaggtccacagcagcttagacctggagtcatctgttttggtcttagttctgacactttaatgggcttgggaccctggagcaaaagttctcctctgtgaagcgaggatttcaggagcgaggatttcaggactgaggcagcctgtgaagctgtgtaaccgagacacgcttttccttaggtatgccgagcagacag

SEQ ID NO: 1324 - DNA, 258 bp, Homo sapien
caatcacacaaccacaaaaaagatactgtgtgctctcactttccaaaattctgcctggtctmctcctgaggaaagyagtgatatggtagctggtgtggatcccctaaaggaattataagatggartgygargaacattatcttagactataakactgkctgcatrcrgatatgktstcraagattattcctgctgcraataaagakmttgskaaagagcartatasagctatcacagtctattgacccamasatgttt

SEQ ID NO: 1325 - DNA, 534 bp, Homo sapien
ctgtccaatggcaacaggaccctcactctattcaatgtcacaagaaatgacacagcaagctacaaatgtgaaacccagaacccagtgagtgccaggcgcagtgattcagtcatcctgaatgtcctctatggcccggatgcccccaccatttcccctctaaacacatcttacagatcaggggaaaatctgaacctctcctgccacgcagcctctaacccacctgcacagtactcttggtttgtcaatgggactttccagcaatccacccaagagctctttatccccaacatcactgtgaataatagtggatcctatacgtgccaagcccataactcagacactggcctcaataggaccacagtcacgacgatcacagtctatgcagagccacccaaacccttcatcaccagcaacaactccaaccccgtggaggatgaggatgctgtagccttaacctgtgaacctgagattcagaacacaacctacctgtggtgggtaaataatcagagcctcccggtcagtcccaggctgcag

SEQ ID NO: 1326 - DNA, 177 bp, Homo sapien
ctgcattatgtgtgtttagaacgagaagttgtttgtacagtatttttctattgaccgcttccgtcttgcctgaaacctgggcattctttccaatagacagaaaatcagagagtcaaatctgatgcgcaatgagttgttctgagaccagtaatccacggtgctgcaatttgggttttt

SEQ ID NO: 1327 - DNA, 266 bp, Homo sapien
aaacttgttttatctaatactgagcactgtttttttgtcaagtatttttttaagaccacataattctttttgtctgctcaaggaaaggatagataaataattggcacacatttgtttctcactgaattttacagtagtaaattaatgttataatgtaccacatggagatgagttggtaagaaatcatctagttccagagcccagggattataaacagtaggtgaaatagatttatgacttacgaaatatgttgtgacaatatattt

SEQ ID NO: 1328 - DNA, 409 bp, Homo sapien
ctgtccaatggcaacaggaccctcactctattcaatgtcacaagaaatgacgcaagagcctatgtatgtggaatccagaactcagtgagtgcaaaccgcagtgacccagtcaccctggatgtcctctatgggccggacacccccatcatttcccccccagactcgtcttacctttcgggagcgaacctcaacctctcctgccactcggcctctaacccatccccgcagtattcttggcgtatcaatgggataccgcagcaacacacacaagttctctttatcgccaaaatcacgccaaataataacgggacctatgcctgttttgtctctaacttggctactggccgcaataatcccatagtcaagagcatcacagtctctgcatctggaacttctcctggtctctcag

SEQ ID NO: 1329 - DNA, 136 bp, Homo sapien
ccattttcgcacagtccaccataaaattgaaaagattgaccagagacagatcatggagggcttggcaatctgtactgatgaagccatggaccagaagagaagtgagtcaatgaagagagtttctcttttcacatgg

SEQ ID NO: 1330 - DNA, 311 bp, Homo sapien
ctgctaacagccctaacggtgcaacacaagtacaaactcaggaacctcttcgactgccacgcccttcaccaacagaaggaagacagtggcgccaccacaagtggcagggcacaggggcttctgtgacaacaatatgtccttctagtatacattcattgcaaaggctgccctgaagtttcgtttttggaaataactgttatcatacattttgtatgatgttgcttgtgggcaccatgaagagagcctggctgtaaaggacagagggagctaaaccaacaatgcatggccctgcgtgcccacaagagggagcc

SEQ ID NO: 1331 - DNA, 613 bp, Homo sapien
ctgggccakgagctgtgcccggtgcctgcagccttcataagcacacacgtccattccctactaaggcccagacctcctggtatctgccccgggctccctcatcccacctccatccggagttgcccaagatgcatgtccagcataggcaggattgctcggtggtgagaaggttaggtccggctcagactgaataagaagagataaaatttgccttaaaacttacctggcagtggctttgctgcacggtctgaaaccacctgttcccaccctcttgaccgaaatttccttgtgacacagagaagggcaaaggtctgagcccagagttgacggagggagtatttcagggttcacttcaggggctcccaaagcgacaagatcgttagggagagaggcccagggtggggactgggaatttaaggagagctgggaacggatcccttaggttcaggaagcttctgtgcaagctgcgaggatggcttgggccgaagggttgctctgcccgccgcgctagctgtgagctgagcaaagccctgggctcacagcaccccaaaagcctgtggcttcagtcctgcgtctgcaccacacaatcaaaaggatcgttttgttttgtttt

SEQ ID NO: 1332 - DNA, 591 bp, Homo sapien
  misc_feature (1)...(591): n = A,T,C or G
ctgagttaanatggtaaagccaatattattttaggaggaaagaggacgaaggccaatgaaccaacatctgcctgctatctggtgcatcacccaaggtgaccaatggctgggcacaaataaacttctcttttgctagccacagagttgctcactgtggcaagcctgagctggtcagaacacctgtgtgtgtgttcctgatacacactaaccacaataagcaagtctgcacacatctctatgagccccatgcaaagacaagacattcccaaagatcagtcactagagtgcaacaacgaaattcaagatttgaccaaaacagaccctgctgcctcctaaattgccaattgcctctcaaaaacttacagaaaaagggacattataagaattcatagagggagagaagaaaaagctgctactcctagtcattagtacaatgtgctgtgttaattagatacctctatataaattagaaaaagtgctttacttgcatgcttcaataaaatgaatactgagtgtcgtagtgttagatctgtacagatataaattttttgcagctatataaaagtgtataagatgggcttttgcatttta

SEQ ID NO: 1333 - DNA, 379 bp, Homo sapien
ctggtacaaaggcgaaagagtggatggcaacagtctaattgtaggatatgtaataggaactcaacaagctaccccagggcccgcatgcagtggtcgagagacaatataccccaatgcatccctgctgatccagaacgtcacccagaatgacacaggattctataccctacaagtcataaagtcagatcttgtgaatgaagaagcaaccggacagttccatgtatacccggagctgcccaagccctccatctccagcaacaactccaaccccgtggaggacaaggatgctgtggccttcacctgtgaacctgaggctcagaacacaacctacctgtggtgggtaaatggtcagagcctcccagtcagtcccaggctgcag

SEQ ID NO: 1334 - DNA, 384 bp, Homo sapien; identical to SEQ ID NO: 251

SEQ ID NO: 1335 - DNA, 555 bp, Homo sapien
aaattagttgctataaattcatcaatactttttttccctattatatttttggttctattaggatttacttaactgaatcttataacaattcgaggtgaactgtggcaatgaaaaccagaaacagttaatgagatgcttcagctcacagtttgaagtgctgagaacctaagtattttgctgtacggtactgagctgtaccaaaatatgatggtttaggtttatgtgcaagactttgtgttgtagtctagacaaaggggtgggcaagagacatgcaaagctgaagccctgcttgaaaagacccttcaaggaagtaaaatggcaggggcagagtgcagcttaacatgttgctatccctgttgtttttgagttggttttggaatggattcaagttcttacacaatttattttgaatacaagcataatctaggtgatttgagttaatgaacttcttttcatgatgtagggaaagctgaatgtatatatttctaagaagaatttgtttagcagattacaagttggcaaaatagactgttcacagaaactaggcaaaaattt

SEQ ID NO: 1336 - DNA, 505 bp, Homo sapien
cctggaaagaagcccagcaaaaggttccagatgaagaagaaaatgaagagagtgacaacgaaaaggaaactgaaaagagtgactccgtaacagattctggaccaaccttcaactatcttcttgatatgcccctttggtatttaaccaaggaaaagaaagatgaactctgcaggctaagaaatgaaaaagaacaagagctggacacattaaaaagaaagagtccatcagatttgtggaaagaagacttggctacatttattgaagaattggaggctgttgaagccaaggaaaaacaagatgaacaagtcggacttcctgggaaaggggggaaggccaaggggaaaaaaacacaaatggctgaagttttgccttctccgcgtggtcaaagagtcattccacgaataaccatagaaatgaaagcagaggcagaaargaaaaataaaaagaaaattaagaatgaaaatactgaaggaagccctcaagaagatggtgtggaactagaagg

SEQ ID NO: 1337 - DNA, 385 bp, Homo sapien
ctggtgctagtcagagctaatgacagaatttcagtttaataaaaagacccccaactgagcacaccatcttgaaaaaagtatacttatcaaacagctttcaatcagttcaagagagacaccttaattggggagaggaagaattgcagagtagtttgtaatcatgccaattccagatcaataactgcatgtctgttctttggtagaaatagcttttgctttatattaagtaatcacatatatattctctctatttggataaggaaaccttcgctttatttgacaatgtataatgatatactcttctaattcacctctgtgtcttcacaataaacatgagtaaaatttagacaagtgatggtaaaggtcaatataattatttattttt

SEQ ID NO: 1338 - DNA, 350 bp, Homo sapien
aaaggtgatattacacaaaacctcgtcttttgttcaactttggatccattggcaattcaatggcctcaatctccccaaactcgccaaagtactccctgatcttttcctcagtggcttcaggattcagacccccaacgaagattttcttcaccgggtccttcttcatagccatggcctttttagggtcaatgacacggccatccagcctgtgctccttctggtctaggaccttctccacactggctgcatctttgaacaggataaacccaaaccctcttgaccgtccagtgttgggatccatttttattgtacagtcaacgacctctccaaatttagtaaaatagtctttt

SEQ ID NO: 1339 - DNA, 443 bp, Homo sapien
ctgctcctctagtaataagttcctggggataatacattaaccaacattggttgaaacatacctgagtaatcatatcaggatgcatgttaagctgataaaacaataagatcccaaaatgcagtagctcaaaaaaagtagaagttaatttatctcctgggggacagctctggttctcaaattttacaggctcagaatcacctgcagggcttgtgaaagtacagattgctgcgctccgcccccagagtttctgatttagtaggtgttaggctgaaccaagaatttgcctttctaacaagctcccaagtgatgctgatgacttgtaggaatggatttacttctaggattagacttcagctcactctgtttgctgaactctttctaatatttcttaagttggtagactcyctgctccaggttctcaacgtgaaggaaggaacccccag

SEQ ID NO: 1340 - DNA, 273 bp, Homo sapien
cctcaggaacaggtaggggcagcagaatagaatagcatccatttcccagagaaagactgcctttacatktcccatgcttttagcacaaagcagcgtctgggccactgttaccagaggtgagtttatacatttacaaaatgcttaaaatctttgggaagcaagaggaagctaaacagaaggtcccatgttaactgaaggcaaattcactcaacctctctagtaagggacccatgggcctacagagtgttccctctacaatgtgcagagtggaaa

SEQ ID NO: 1341 - DNA, 561 bp, Homo sapien
ccatgggcccggtcacgaacaaaacgggcctggacgcctcgcccctggccgcagatacctcctactaccagggggtgtactcccggcccattatgaactcctcttaagaagacgacggcttcaggcccggctaactctggcaccccggatcgaggacaagtgagagagcaagtgggggtcgagactttggggagacggtgttgcagagacgcaagggagaagaaatccataacacccccaccccaacaccgccaagacagcagtcttcytcacccgctgcagccgttccgtcccaaacagagggccacacagataccccacgttctatataaggaggaaaacgggaaagaatataaagttaaaaaaaagcctccggtttccactactgtgtagactcctgcttcttcaagcacctgcagattctgatttttttgttgttgttgttctcctccattgctgttgttgcagggaagtcttacttaaaaaaaaaaaaaaattttgtgagtgactcggtgtaaaaccatgtagttttaacagaaccagagggttgtactattgttt

SEQ ID NO: 1342 - DNA, 159 bp, Homo sapien
aaagatggcaaggcaataaatgtgttcgtaagtgccaaccgactaattcatcaaaccaacttaatacttcagaccttcaaaactgtggcctgaaagttgtatatgttaagagatgtacttctcagtggcagtattgaactgcctttatctgtaaatttt

SEQ ID NO: 1343 - DNA, 76 bp, Homo sapien
aaaatgtaaagccaatctatcaccaaaaatggcataaatgtaaacacaagctaattttataatccactgctatttt

SEQ ID NO: 1344 - DNA, 726 bp, Homo sapien
caaaagcagcctgaatacgcaactcacgccaagagggcagcagctctcctgacatccatgtaagaaggctaacacctaaaccacacgcaggcatcctgaactcagcagctctgatccaaggtactgagtggagacaaagcactcggaggtggcaagatgttcagcaaccaagtaagacacactggcaaggcatcccacccaaaggtgagaagcacaaagcaggcttggagaaacaaacagtcatgccaggtgcagccagacatcctgctataagccctgaccctagtaccccgagttcatcaagtgctctggttttgtgtccataaagcacagagggcactgaccaccccaaaccagaatcccaaggaatccttatggatggcatagggcctcagaactgctgcaggatcattttccttttcaggtcgtggctgaacttgttcatcctgaagagctcactgtcataaaatgcagagaggttgtggatgttgatctgacgagccttatccaccaagtccttmtcagggacctcaatagtgtcctgctgggccccaaagcggttgcgctgatatgtcacstgctctgccactaactgcttcagtatgaagagcaacagctcattgttgtcacgccggaatgaaaggtagcgggcaaaagtcttgcgcatgctgcgcatgacgctgaacttctgtgtgtctatgaagstctccakmatcaygagratgg

SEQ ID NO: 1345 - DNA, 742 bp, Homo sapien
ccagagagccctgtcctgtgagggtggttatcacagtggcagggttcaattcagaagaccttgagggcaggctgatgtttcctgaatgggcccctggttgttgcttgtccctgactctccatttccccatctgagtggatttggacctaatagggcactggagctggttcgaatcctgactggactacttggcaactttatgtctgggagcaagttacttaacctccccaagcctgtgtctgtgaaatgcgggtaaatgaatgtagatgtttggcagcagctactccttgttgagctctcacagtgaactctcctgcctctgccctccttccccgcctcccctggtgcctagcgtcaggtctagccacttcctcctgggcccctctcccttttctgtggctggctgcctgcccgcctggcgctggacctttcatgtaacgggaatcagcatgtatattctggtctggtctgtttctacacttaattttgtttccagtagtatttccctgtaccggcagagttcacaaacacatttgaagaggctttttctcaggattcttaaccttccaaaggaagtcccatggatgggtttctagaagtctataaatgctctgaaattgtatttttctgtggaaaagcataacttttatctgcttggtcgtgctcaaaaaaagatcatgaatggaatgaattgcattgaattttatgccattgggggcttaatactaaaaggatatggaag

SEQ ID NO: 1346 - DNA, 573 bp, Homo sapien
  misc_feature (1)...(573): n = A,T,C or G
aaatgcattkttaacttacagtattttcaacttacgatgtgtttatcasgaagtaaccccatcataagcagaggagcatctgtattgcgtaatttgactggcacagtttattaggttctgttcagtgwtttccgtcaacaagatgtttattgtgtgagtaaacaagttaagccctgtgacaagctgaataagaatagtctctcctcagcagcttatagtaaacaagggtagtaatccttacattagtggctagactatcaaacgaaatatataacatgtaagaacactaaagacagaattactgtggcatagagatagttagaattgcttcagcctaagagatgaattaggtaatgcaaggaggtgaatatgttggcctgcaatatgaacaaggcagagagctgggagagtaagatgtaagttgctaaggagggatgtgtcttgagtttggaaaccataaagggaaatcataggtaatgctagagtcactgatcttanggagccttgaataacggtgatgactaagggaatctttattttggngggactattggaattaaattggccagaatt

SEQ ID NO: 1347 - DNA, 333 bp, Homo sapien
cctggtttctggtggcctctatgaatcccatgtagggtgcagaccgtactccatccctccctgtgagcaccacgtcaacggctcccggcccccatgcacgggggagggagatacccccaagtgtagcaagatctgtgagcctggctacagcccgacctacaaacaggacaagcactacggatacaattcctacagcgtctccaatagcgagaaggacatcatggccgagatctacaaaaacggccccgtggagggagctttctctgtgtattcggacttcctgctctacaagtcaggagtgtaccaacacgtcaccggagagatgatgggtgg

SEQ ID NO: 1348 - DNA, 185 bp, Homo sapien
aaaaaagcttgcagcaagaaaatgccagtgtgcaactgggtgactaaagaccaaagaaaaacagttaaaagggacagcttacttgctctctgtctcaggtttaacttctcacctgaaatctctcatagccctaattaaacacaaacaaaagtctcttccatagataggctacttctcagcttcag

SEQ ID NO: 1349 - DNA, 171 bp, Homo sapien
gcggcagcgaggggctcggagaggtgctcggattctcgtagctgtgccgggacttaaccaccaccatgtcgagcaaaagaacaaagaccaagaccaagaagcgccctcagcgtgcaacatccaatgtgtttgctatgtttgaccagtcacagattcaggagttcaaagagg

SEQ ID NO: 1350 - DNA, 400 bp, Homo sapien
ttgtcatatcatatctatgtcacctgtgtattctgagattacacacatacctgccaatatacctgggaaaggttattttatcacagttacacttgagttcttggcaggcaggactgaggaagagtaatttgaaagaagttttacatcctatttagaagaaatcactagtatttccttaaataacaggttacaatagaaagatactgcctggaagttatcctttcactttggttcatttttagtttttctttatgatttacatagctgtttaattcatttgcttatagtacaatcctgccataaagtattaaagcacaagatacctattattccttcaacatctgcatttttcaagttttatactctacatccacagtacgtcagcagttcttgaatgttt

SEQ ID NO: 1351 - DNA, 309 bp, Homo sapien
ccaggaaagggcagtcctgagggagaagacaggattcagggcagtgctccgaagctgtgtgctcacctggttggctcatcaaacctggcaaccctgtggcctgtctgccggagctgactggatccactcatcaattcttcgtccccactactaagactgggcatgttttgctggtgtggtctctgcacttcaggaatggtcacaacagggggtagccctcaaaagcactcctttttctatacctcttctcaaggccatgtaagttgcccatctctacctggctgtggacaaaaggttatctgctcttgg

SEQ ID NO: 1352 - DNA, 268 bp, Homo sapien
ccacttcatctgtgtgggaacgtggtcaggccgggtgctggtgtttgacatcccagcaaagggtcccaacattgtactgagcgaggagctggctgggcaccagatgccaatcacagacattgccaccgagcctgcccagggacaggattgtgtggctgacatggtgacggcagatgactcaggcttgctgtgtgtctggcggtcagggccagaattcacattattgacccgcattccaggatttggagttccgtgcccctctgtgcag

SEQ ID NO: 1353 - DNA, 620 bp, Homo sapien
  misc_feature (1)...(620): n = A,T,C or G
cctgagtaattattccatcatagacaaacttgtgaatatagtggatgaccttgtggagtgcgtgaaagaaaactcatctaaggatctaaaaaaatcattcaagagcccagagcccaggctctttactcctgaagaattctttagaatttttaatagatccattgatgccttcaaggactttgtagtggcatctgaaactagtgattgtgtggtttcttcaacattaagtcctgagaaagattccagagtcagtgtcacaaaaccatttatgttaccccctgttgcagccagctcccttaggaatgacagcagtagcagtaataggaaggccaaaaatctccctggagactccagcctacactgggcagccatggcattgccagcattgttttctcttataattggctttgcttttggagccttatactggaagaagagacagccaagtcttacaagggcagttgaaaatatacaaattaatgaagaggataatgagataagtatgttgcaagagaaagagagagagtttcaagaagtgtaattgnggcttgtatcaacactgttactttcgtacattggctgggaacagtcatgtttgctttcataaatgaagcagcttt

SEQ ID NO: 1354 - DNA, 398 bp, Homo sapien
aaaggattatttttatgcaaagtattctgtttcagcaagtgcaaattttattctaagtttcagagctctatatttaatttaggtcaaatgctttccaaaaagtaatctaataaatccattctagaaaaatatatctaaagtattgctttagaatagttgttccactttctgctgcagtattgctttgccatcttctgctctcagcaaagctgatagtctatgtcaattaaataccctatgttatgtaaatagttattttatcctgtggtgcatgtttgggcaaatatatatatagcctgataaacaacttctattaaatcaaatatgtaccacagtgtatgtgtcttttgcaagcttccaacagggatgtatcctgtatcattcattaaacatagttt

SEQ ID NO: 1355 - DNA, 371 bp, Homo sapien
ctggytcctcagtgggaactgagtcattacctgctaaagggtagaagaggagagagagaggccagagcctggggatggggcagaaggtgcagcaggaaggaaggttagagtgagaaaaatttccaaataaggggtgatgtgtgagtgctcagagggtgactgaggacatctccagcatttccattgaggagggaggaaggaggggcccttgggttctggggcagatgccggcagggtctggatgagatgcccccaacctcaaccctggtcctctgaaaacacttcacccagtcacactgaggagcccctccaggcccaggggcccctccaggtaggcgtatctcagctcctctctggaaggacccccacag

SEQ ID NO: 1356 - DNA, 338 bp, Homo sapien
gcggcgcgggcggcggtaaaatgtcggttccaggaccttaccaggcggccactgggccttcctcagcaccatccgcacctccatcctatgaagagacagtggctgttaacagttattaccccacacctccagctcccatgcctgggccaactacggggcttgtgacggggcctgatgggaagggcatgaatcctccttcgtattatacccagccagcgcccatccccaataacaatccaattaccgtgcagacggtctacgtgcagcaccccatcacctttttggaccgccctatccaaatgtgttgtccttcctgcaacaagatgatcgtgagtcag

SEQ ID NO: 1357 - DNA, 159 bp, Homo sapien
ctgggctgctgcctctggagtacttccccgcagctcctcattgctcacatagtaggcaatggcgttgctctcaaacacacagaatccatcatcaccctcaaatgctgggaccttgccggcaggaaatttgcggagaaattcaggggtgcggttggtttg

SEQ ID NO: 1358 - DNA, 306 bp, Homo sapien
cctgtcagagtggcactggtagaagttccaggaaccctgaactgtaagggttcttcatcagtgccaacaggatgacatgaaatgatgtactcagaagtgtcctggaatggggcccatgagatggttgtctgagagagagcttcttgtcctgtctttttccttccaatcaggggctcgctcttctgattattcttcagggcaatgacataaattgtatattcggttcccggttccaggccagtaatagtagcctctgtgacaccagggcggggccgagggaccacttctctgggaggagacccaggc

SEQ ID NO: 1359 - DNA, 382 bp, Homo sapien
agagggagtccagcccccaagccttgtgaggcactgttargcagatagggaaaagaggggtccttagatcactggttcaaggagggatctggtaggggcagcatttcttctgggctggaaacagaatgggggtttcaagatggcagaaccattccattattggagctataagcccctagaattgctccatggcctatctcggtttcccttggatctcatctgctcctgaactgcacctgtcatggcaagtccatctccggcccccatctcccctgagccaatgtgagtcaggtgaacaaaattcattggttccccaatcatggtccggtcaatccgtcttctcttcttctttcttctccaccatccagacgttcagctacag

SEQ ID NO: 1360 - DNA, 365 bp, Homo sapien
aaaaaacctttcaaaataaaacttagtaaaatctagaactgkttcttggcctacttgagaggaacttccatattttcacagccatctccgaaagcagcagttgctgtaaattaactgagacttggaaatggtgcagactgtcttggtagagctgttcttatagcacaattttatctggaaaataaacttgtaaatgcgtgctgtatattaatacatgtgtgcccatatttatttttattatctcctgccagtctttgctcaatgggagatgacagaccaacttctcaacgtgatttccccatttcattgaatgacatttatatgccacttatgaaaaaaatactgctgtgaaagaaatgtacttt

SEQ ID NO: 1361 - DNA, 502 bp, Homo sapien
gaggtatggaaaaatatcaacaaggaaatattagatttgaactgctgcttcgttagcacacagcacattctccaggatataccatatgttaggacacaaaacgggtctcaataaatttttaaaagtcaaaatcttatcaagtatcttctcagaccacaatggaataaaactggaaatcaataacaagaggaacttctgaaattgaacagatacacggaaatcaaactacatgttcctgaatgaccactgtgtctatgaagaaattgattttaaaaatttaaaaattctttgaaacaaatgaaaatagaaacacagcatacaaaaatgtatagggtacaacaaaagaagtgctatgagggacatttatttcaataaacacccacatcaataaggtagaaagtttttaaacaaataacctaataaacgcatctcaaggaactagaaaagcaagaacaaatcaaacctaaaattagaaggaaataaatagtaaagatcagagcag

SEQ ID NO: 1362 - DNA, 545 bp, Homo sapien
ctgattggatgtctaggaatgactgaaagaaaccaaaacagcctgtccactgctgctgtgggatggaggaggcgtaagcagaaacactaacagtatactgacctcttagcagaaccgcttccattctggagatcacggctgctaaatccagcatccccacttcattttacccccagcatattgttctgtagtcttttcttgaaacatcttgattgcttttcctcggcagctttcaaaaaaccaaataataatagttatccgtcttctacttcatggaagattgttttggtgccctgaccctctgaagtgcccagttcctgccatctgaaacctcggcctgatctgatctcatgttggaatctgcctgtctttcacacagggctggtcttggtcctttacatgccagttttgcttgtgaattcttgcttttttcctctcatcagccttaagtttaggcgtttgttgttctccagtgatgtagacagttcccttcacaagtcacagttcttcccataaatgaggcccgctgacctctgcgggacttt

SEQ ID NO: 1363 - DNA, 286 bp, Homo sapien
gggagatgcaggatgtagacctcgctgaggtgaagcctttggtggagaaaggggagaccatcaccggcctcctgcaagagtttgatgtccaggagcaggacatcgagactttacatggctctgttcacgtcacgctgtgtgggactcccaagggaaaccggcctgtcatcctcacctaccatgacatcggcatgaaccacaaaacctgctacaaccccctcttcaactacgaggacatgcaggagatcacccagcactttgccgtctgccacgtggacgcccctgg

SEQ ID NO: 1364 - DNA, 503 bp, Homo sapien
ccatcaggatcatgaaaacaaactttggtgaatgtgagcaactgcgccagacaggacacaggttacagggcctgacgtcactaacggtaactgacaatcttggaatggaccctactgctgatgtttcaaaaggacacagaggtgaactggtcacttctaattaagaagagccagtggggtgggggaagctgaaaaccaaaaatccacgtagacatacgtggcagtgtgaacgtctgtcctccccttccttctcctcacttcctctcctcctcctcactcaggctggtattctcctggtgtgcggatgtcagcttgccctgcagaagggctgccagttttttagatgtctttttgagaaacgagctgcccggatgggcactgttcacgtgcaggtacaggtcctcctgggtggggcccgtgtagccgcaatcctcgcagacgtagagcttgtcccgccgctgcttataggcatactgctgctgcaccccatggattttcttcag

SEQ ID NO: 1365 - DNA, 245 bp, Homo sapien
ctgggcggctccacgctcatccagtgggcctaggttctgactgaccagcgaacaaaaactgtgacagagatctaggatttcattcaggcagtgaaacacctacccgggaaacagagttggcattaggaaaggaaggaaggtacatccatgaagttaaagtgttaggagaacagtctgattaatagctgatctaattaatagctgacctcccaaatctgacaggatagacactgccacgtgcaagg

SEQ ID NO: 1366 - DNA, 131 bp, Homo sapien
aaaatccccataaatcttttctgtcctgaggtagttgcaaaataaatcataacttggatatcaactagagctgaggctttgactttttactcattaaaactagttgttacaggaactacctttagatattt

SEQ ID NO: 1367 - DNA, 430 bp, Homo sapien
ctgtgcagttatatgaccataaaggaaatgaaccattaaaaatggatctacagccatatattctgccgttactcagaggcttaatgatttattttccccctccagccctgcctttaccaggttaaatgacagaagaccttctattgtacctattgttcaaaaaatattactgttctgtggaacctgggagagtccaattgataagagaaactgaatcatactgatgaggtgaaggataggtctgccggtgtggggcagggcactctttctcagcagccaagataacttatcacacacgaagcagagagaatgcacccgatgaaaatctctctgaactgtgttccttgaaggatctcttaaaaaaaaaaaatctgaaacatcatccattgaacaaatgaaaggcttatacctttaccatgaagaaacattt

SEQ ID NO: 1368 - DNA, 294 bp, Homo sapien
ctgggcggatagcaccgggcatattttggaatggatgaggtctggcaccctgagcagtccagcgaggacttggtcttagttgagcaatttggctaggaggatagtatgcagcacggttctgagtctgtgggatagctgccatgaagtaacctgaaggaggtgctggctggtaggggttgattacagggttgggaacagctcgtacacttgccattctctgcatatactggttagtgaggtgagcctggcgctcttctttgcgctgagctaaagctacatacaatggctttgtgg

SEQ ID NO: 1369 - DNA, 429 bp, Homo sapien
ctgaaggcaatgggggactgaggaaggaggcagcagaagtaggagaggagcaagaatccagaagggaaatgagaacgacaaaactgaagtgcacttcaacatcctgcagccaaaggggtaaaaaggagaaagaagtgcagaccagtcacataaatgccacagtgacatgcacaaaaacgtgaggggcacactccagggacagagtctgacaacatgacaagctacatggcatcaaactctttcatgtgacaggcagcttttcacatgtgcatcttaagactggaacttgctatagataaaccttaagtagttaataaaagcaaaagtcatcctctattcactgtttgctgccatgttccaggcatagtacttggcactttttattttatttcacttgatcagctcagaaagtcctccaaatgagtattt

SEQ ID NO: 1370 - DNA, 540 bp, Homo sapien
ccactcccaggatgctgggtctcgcttgctggctgggaccccggagccgtcagtccacgcactcccggatgcactcaacaacctaaggacgcaggagggttccggggatggtccgagctcgtccgtagattggaatcgccctgaagatgtagaccctcaagggatttatgtcatatctgctccttccatctacgctcgggaggtagcgacgccccttttccccccgctacacactgggcgcgctgggcagaggcagcacctgctttttccctacccttcctcgattctgtccgtgaaatgaattgggtagagtctctggaaggttttaagcccattttcagttctaacttactttcatcctattttgcatccctcttatcgttttgagctacctgccatcttctctttgaaaaacctatgggcttgaggaggtcacgatgccgactccgccagagcttttccactgattgtactcagcggggaggcaggggaggcagaggggcagcctctctaatgcttcctactcattttgtttctagg

SEQ ID NO: 1371 - DNA, 142 bp, Homo sapien
ttaaaatggtagcacaagagtctggcaagttggtactgcagagaaaaggggttaattgaggcttgtttggagtcgggattcccctttcccaaacatgcgtctcgccacttggacagcagccatttgtactcgtatacttttt

SEQ ID NO: 1372 - DNA, 377 bp, Homo sapien
ccaccatctgtgcaagtagccaaaaccactccttttaacacgagggagcctgtgatgctggcctgctatgtgtggggcttctatccagcagaagtgactatcacgtggaggaagaacgggaagcttgtcatgcctcacagcagtgcgcacaagactgcccagcccaatggagactggacataccagaccctctcccatttagccttaaccccctcttacggggacacttacacctgtgtggtagagcacattggggctcctgagcccatccttcgggactggacacctgggctgtcccccatgcagaccctgaaggtttctgtgtctgcagtgactctgggcctgggcctcatcatcttctctcttggtgtgatcag

SEQ ID NO: 1373 - DNA, 504 bp, Homo sapien
ccatgctaagtttgggaaccgctggtgatgggacatggatgcttgcaaccgaccgtgggcggatgtggttgaccagatggcagaggacgacaccatccatgagggctgcccccaggtcttcgtgcagactgaccttcaatctcatctcaatgctctcacgaagttgttccaccagctctttctcttctctcatctgctccattttcctccggattgtaaactgcgggtctatagattccaaatttctctgaggtcttagaaacacagactcagaaatcaaatgaggatgtctcagaaaggagtcacttttccagaggcaggctgccccttaactcagccgagcagcaggaaccactggggccaaagctattttatcttccttaggtaaaaaaaaatcaatagaatatttcttccccgcttacatgctcccaccactgatgaacgcgatcttcagcaagaagaactttgagtccctctccgaagccttcagcgtggcctctgcag

SEQ ID NO: 1374 - DNA, 201 bp, Homo sapien
cctccgtaagatgcttgacaattttgactgttttggagacaaactgtcagatgagtccatcttcagtgcttttttgtcagttgtgggcaagctgcgacgtggggccaagcctgagggcaaggctataatagatgaatttgagcagaagcttcgggcctgtcataccagaggtttggatggaatcaaggagcttgagattgg

SEQ ID NO: 1375 - DNA, 295 bp, Homo sapien
  misc_feature (1)...(295): n = A,T,C or G
ctgtgaggctgnttccaaggaggaaaacaaggaaaaaaatcgatatgtaaacatcttgccttatgaccactctagagtccacctgacaccggttgaaggggttccagattctgattacatcaatgcttcattcatcaacggctaccaagaaaagaacaaattcattgctgcacaaggaccaaaagaagaaacggtgaatgatttctggcggatgatctgggaacaaaacacagccaccatcgtcatggttaccaacctgaaggagagaaaggagtgcaagtgcgcccagtactgg

SEQ ID NO: 1376 - DNA, 318 bp, Homo sapien
ccagcgctactgtactggcccagggcagagttcatgtatctcgtcttgaccacgtctacaggggaggcgatgacagtggtgcagaagcctgccccaaaggcagaagtgaagtggcaagggaggtcatctgtcatgaggttggctttcaggagggcatccttgatgaggtcataggtcaccagctcagcacagttgacaatggcattacgagcaacattgggggaggtccctttccagaggccccggaacccttcctctcgggcaatggtcttgtaggcattgacggtgctttggtatctccgaccacctccagcccgg

SEQ ID NO: 1377 - DNA, 143 bp, Homo sapien
gtggattccgytccgggcaccgatctcgccaagatcctgagtgacatgcgaagccaatatgaggtcatggccgagcagaaccggaaggatgctgaagcctggttcaccagccggactgaagaattgaaccgggaggtcgctgg

SEQ ID NO: 1378 - DNA, 98 bp, Homo sapien
aaatattggtaataggtcggcaacagcaactatagaagtacaactcaatagatggcattaaaacatattgtagtgtggatatatattttttctttttt

SEQ ID NO: 1379 - DNA, 330 bp, Homo sapien
aaagatgttcacgttacgctggaccaaattaagacggctttctccctcttgctgacgtgccccagccgtgataatgaccagcttggagtttgcagttacattatagtctttgccagagacaatctttggtgttctaaggaaaaggctgccatgttggagatccatcatctctcccttcaatttgtcttcgacgacatcaacaagagcaagttcatctgccaagtccttcattaagatactgatggcacaggccatgccaacagcaccaaccccaacaactgtaatcttattctggggggtctgttcttcctttagaagattataaatcag

SEQ ID NO: 1380 - DNA, 269 bp, Homo sapien
ccactcctggaaacccactgatagatgagtttcccccattcttctggcctccgccacatgatcaggaagctggacttgctcttatccaaccactcgaggttccctttcttcctcagttcctctaatacaatctggatcgactccacaggaagctttcgctgtagcttgacgttgttgaagagcgggctctcctgagcttccatcaccgtcatgctggactgtttgtgcaggcggcagaaggacaggaccagcgagcaccaggcggccag

SEQ ID NO: 1381 - DNA, 232 bp, Homo sapien
aaaagagaggaaaggcagtgcagggctggaggtcctggagggtggcggcgggtcgtcctaactagcaggctgaaaggtgctggaggggatgccttcactcagaggaagttcacagccacctgccttggaacatgtacctgttcatcttttcgtaatgttagtattcattttgctatcttcctgttgccatttccaaacagtgtcagtatgtttttgttaaatacgaacattt

SEQ ID NO: 1382 - DNA, 348 bp, Homo sapien
aaacgtgctaaagggaaaggaatctgacattctgggtaaatcttactcaatctaaatcaaagcttggttttcaggaggaggaaggtgcgagcgcaggcagaggtgctgaatactcctcttctgattcacttccatcatcctctttctcttggtcactgccctcagtgctaagccggtcaaacccttttcgactgtagcccttacggcttgcaaagaaattaccaaggtttaagcctccacttccctttcctctaaatcttcccagtactcttcctgaactcgtctcgagtttgtgttcagaatctccaaaggcccttgattttttccaccgaataaatatggcaatgg

SEQ ID NO: 1383 - DNA, 293 bp, Homo sapien
  misc_feature (1)...(293): n = A,T,C or G
ctgcttcaanacctcagcttcatgggacttgcgtctttcttctgcagcttctaatttcttctgaatttcctccagggaaagatccttcttctttggaggggaaagggggaattctggaacagattcttttgaccgagggctgagaatcagctcaaaagcctggcccgaggcacgcttctccagttctttcacctggatatcagaagaagccatggtgaatagaagacaagcgacaggcagtgtattctgcacaatcaactgggataaggaaagtcctgctcagtccgagccgc

SEQ ID NO: 1384 - DNA, 573 bp, Homo sapien
ctgaagcaacttgggattaattgcttgattagcttcacgaagcacagagataaggtcgctcacttgctttatgttattaggtgtaaagaaagtgtatgctgtgcctgttttggtactgcgagcagttcttccaattcgatgaatataatcctctgaggagttagggtagtcataattgatgacaaatttcacatcttccacatctagccctctggaggccacatctgtagcaatcagaataggagcttttccatgtttgaattcatttagaacccagtcacgctcttgttgactcttgtcaccatggatacccatggcaggccacccatctctcctcatttttctggtaagctcatcacatcttcttttggtttccacaaaaacaatggttttattctccttctcactcatgatctcttccattagacgaataagtttttcatccttttctacgtcatgacacacatccacaatctgaagaatgttgtggtttgcactcagttcaagtgcaccaatgtttatatgaatatagtctttcaggaaatcttcagcaagctgtcttacttcttttgg

SEQ ID NO: 1385 - DNA, 150 bp, Homo sapien
ccaaggccgctagggtccttacccctcaggatcactccccagccctttcctcaggaggtaccgctctccaaggtgtgctagcagtgggccctgcccaacttcaggcagaacagggaggcccagagattacagatcccctcctgtaagtgg

SEQ ID NO: 1386 - DNA, 159 bp, Homo sapien
  misc_feature (1)...(159): n = A,T,C or G
aaatgatgttttggttaagagtggaccatgagaattagctgacagcatcccctttctctctccctgccttggtgggaccctccctgtgtgaccttggtcaagtcctcgaacttttgtcccgtatttaagatggagctgntttacctacttcataagaca

SEQ ID NO: 1387 - DNA, 735 bp, Homo sapien
  misc_feature (1)...(735): n = A,T,C or G
ggtgnaattcgcctttgaanggccgccgggcaggtcctttntgtstgctgaaggcagatcgcttgttccacaccagctaccactcccaggcagtgcatatccgccctgtttgcagaaatgcacgctgtactagcatctcctgggagctgaggcagaccctgtcagttgtatttgatgccttcatcacggggcagggaaagaaagactggtccctcttccggatgttctcccgaaccctcacggagccctgccccctggcttcagagagccgagtctatgtggacatcaccacctacaaccaggacaacgagacattagaggtgcacccacccccgaccactacatatcaggacgtcatcctaggcactcggaagacctatgccatctatgacttgcttgacaccgccatgatcaacaactctcgaaacctcaacatccagctcaagtggaagagacccccagagaatgaggcccccccagtgccctttctgcatgcccagcggtacgtgagtggctatgggctgcagaagggggagctgagcacactgctgtacaacacccacccataccgggccttcccggtgctgctgctggacaccgtaccctggtatctgcggctgtatgtgcacaccctcaccatcacctccaagggcaaggagaacaaaccaagttacatccactaccagcctgcccaggaccggctgcaaccccacctcctggagatgctgattcaga

SEQ ID NO: 1388 - DNA, 369 bp, Homo sapien
ctggggacagcctacaggggcctccagcctgtgccagacgaggaggtgattgagctgtatgggggtacccagcacatcccactataccagatgagtggcttctatggcaagggtccctccattaagcagttcatggacatcttctcgctaccggagatggctctgctgtcctgtgtggtggactactttctgggccacagcctggagtttgaccaagcacatctctacaaggacgtgacggacgccatccgagacgtgcatgtgaagggcctcatgtaccagtggatcgagcaggacatggagaagtacatcctgagaggggatgagacgtttgctgtcctgagccgcctggtggcccatgggaaacag

SEQ ID NO: 1389 - DNA, 322 bp, Homo sapien
aaagatgtttctggcattttctttttatttgtaaggtggtggtaactatggttattggctagaaatcctgagttttcaactgtatatatctatagtttgtaaaaagaacaaaacaaccgagacaaacccttgatgctccttgctcggcgttgaggctgtggggaagatgccttttgggagaggctgtagctcagggcgtgcactgtgaggctggacctgttgactctgcagggggcatccatttagcttcaggttgtcttgtttctgtatatagtgacatagcattctgccgccatcttagctgtggacaaaggggggtcag

SEQ ID NO: 1390 - DNA, 450 bp, Homo sapien
aaatattagwtgagactttacaggcacataactgttcagatagaaacaaacataacagactaaaatactttcaaaattaaagccatctagaaaatggaagtaactgaaactgtagccattacaattctttttctggttttgagcaaaaattttatctctctggcaaaacacctttgtctgatcatttgagagacagggttcttgtatactgtttcttcaacgtaaacctcatttacaaaaatagtgacatagcattatgaataaactatgaattggggaccatggaaatgcactagaacaaattttgtaaaaatatggcagatatggaagttaaaaatagaatggatgcaaggactgtactaaaggtgtttggtgtagttacaatgttcactttgcacaactatccctatagtctaggtagccattgggtttctcctcagcagtgtcaga

SEQ ID NO: 1391 - DNA, 304 bp, Homo sapien
aaaaaatcataaatggggtttcataatccaaagttgaaacatttattcttcatagcttcagaatttaacaaccaattgtagaccatgctttccaaatccagtcttctttgctatttttcaaaacttctgagatctagtattaaactgctccattctaaatgtatagttttagataagtattgtacacttgttgataagggttttctgaaagcagtctatcaaatataaagaatggtttctatctaagaatcagcagtgagggaagaaatattaaacacctatcaagaaatcaattattcatttt

SEQ ID NO: 1392 - DNA, 140 bp, Homo sapien
ctggaagaagaactgagacagcagaaagaagcagcttgtttcaaggctcgtccaaacaccgtcatctctcaggagccctttgttcccaagaaagagaagaaatcagttgctgagggcctttctggttctctagttcagga

SEQ ID NO: 1393 - DNA, 166 bp, Homo sapien
aaaactttgtttttcttaaaagcttacagtgtttggctaattctcctcccctttttacaagacgggggccggagggtggacactggtggcaggttaagggatactgtcactttaagaagcctgcagattgaagtgtaaacatggagaaattaggggctgatttttt

SEQ ID NO: 1394 - DNA, 543 bp, Homo sapien
gcagaggctgtggtacaacatggtccttggtgaagacctgcacccctggaacctcccaccatcatcacaactgtagtctcatttgcagtggagaaaagaacccgacgtcccacagccagatatacacccagctccatgccagcccttcatgtttaccttttgctttgttaattacatgtcagactcctagagggcctccagactaataggaagcatttctgtaaccaacctgccacccactgattcagaaatggaaatcacattccacaatctatggcttctaccagctagcccaggaaatacttgaaatcagcattccaattagtgttgagtctcttgattgtgtcatttaccaattaaataactgagacctaagtctgggaacagagccacgaatctgcctttgagatgctggcagatctcaaggccatcaattattgggggagggagggacaaacactcccaatcatccaccagtcagactgaatgtgtagctggcgaggaattacttccacttctggcccagcacaagccctgctttgg

SEQ ID NO: 1395 - DNA, 364 bp, Homo sapien
cctatcatcagtggggttgtattcaccatcatccagggtaccatcttcatacaaggtactagctatgaccaaccgaaacttgtcacccaagtctacagggtaaatttgaatgtttacatctaagattagatccatcttgaaagattcactctcacaatgcagtcgagacactcggtcaaacttcttgccctccgggtcaatatccttcacatcgaaaatatcctcaaacaggatgcccgccatcgcgagggggccacgagagcagcagaaggggtgagagcgcgaccacagttgggagtacgtgcaccccctagcgtggacaagaccggagagaaccaaaagcacctcctgaaagcgcggcggc

SEQ ID NO: 1396 - DNA, 422 bp, Homo sapien
gctgctgctgctattgtgtggatgccgcgcgtgtcttctcttctttccagagatggctaacaggggcccgagctatggcttaagccgagaggtgcaggagaagatcgagcagaagtatgatgcggacctggagaacaagctggtggactggatcatcctgcagtgcgccgaggacatagagcacccgccccccggcagggcccattttcagaaatggttaatggacgggacggtcctgtgcaagctgataaatagtttatacccaccaggacaagagcccatacccaagatctcagagtcaaagatggcttttaagcagatggagcaaatctcccagttcctaaaagctgcggagacctatggtgtcagaaccaccgacatctttcagacggtggatctatgggaagggaaggacatggcag

SEQ ID NO: 1397 - DNA, 653 bp, Homo sapien
ctgacctgctatcccaccccaaatttcagcctgaggtatatttcagtgaaggcaggtagctgtgcttctcagagcagagaagcagttttaagagcaaaaaggtagaggaaatctagaaaagaaccgtcttgatacagatttatcccatggtgtgaagggagggcaaagaacccagtggcacttcgcttatccagcaatttctgtcactgtggtgaccaacttctgcccgttccatagggtcttgaactgctcaggaactgggaattcattaaagtcaccgccttctgtaggaatgaggacattcatctcggaagatttggcactgactatttcacaatccagggaattcttgctcaggtaagcatggcagccatctgttttgttgatggatatggttggcactttacccattacctgaactttgacatccttactgttgattatctccacaatgcccaccacgtcatcgaataccaggccaagtttcttacagttatctactgtaatggagttaattttgcccttgatttgcaatgtcgtgttgacacacttgtatatgtaagccacctgtttcagctctgtgtcctcaatcaccagggtggaaacattttcctgattttccctctcccttcttgccttcagttcaagtacag

SEQ ID NO: 1398 - DNA, 261 bp, Homo sapien
aaaattataactactcattctttctttagccttagataatttgagcagaagccacaacaagcaaaccacaataaatttagaattggcagaaatccacattaactcctcttcccaagtttccacactactaccatttacagttgtaggtttgtaatgtataattatgtaatgcasaaactagctttgacttgtgtracgatgcactgtcaaaggaagcaaagtaagaattgaaattccacattcccagaatttaacactcag

SEQ ID NO: 1399 - DNA, 195 bp, Homo sapien
ctgattttatttccttctcaaaaaaagttatttacagaaggtatatatcaacaatctgacaggcagtgaacttgacatgattagctggcatgattttttcttttttttcccccaaacattgtttttgtggccttgaattttaagacaaatattctacacggcatattgcacaggatggatggcaaaaaaaagttt

SEQ ID NO: 1400 - DNA, 120 bp, Homo sapien
ctgcctccaaccctttgggtctccaccacccaagtttcctgtagggtccgccgggtccaggatcacaggcctgggtttcgtgagctgccttctcaggtacttttcaataatggggttttt

SEQ ID NO: 1401 - DNA, 284 bp, Homo sapien
ctgtagccaaaaagatgctggggcagattgtggacaagtagaagcacctccttcccctctgcgacattgaacggcgtggattcaatagtgagcttggcagtggtgggcgggttccagaaggttagaagtgaggctgtgagcaggagcctctgccaggggacatgcaatctgcagggaggggctgaggggggtcccatggtctctgctgtcttctctgtccacctctttgtagaggagcttgagctccaggaatgctctggtcagggctgctgtgactgttggcc

SEQ ID NO: 1402 - DNA, 198 bp, Homo sapien
ccaggtttctgctggtaccaggctaagtagctggtgctggcgggaacactgtgactggccctgcaggagagggtggctctttcccccggagacagagacagcgtgtctggagactgtgtcacttcaagctctgcgatgccatctgggagccagagtagcaggaggaagagaagctgcgctggggtttccatggttccc

SEQ ID NO: 1403 - DNA, 441 bp, Homo sapien
aaactcaaaattgacaaattaactagcttgctttttgtcatttggaagactaccattattcaaatttattatgtaatacactcatccagataatgaaacatctgcgaaaaaaagtgtgggaatcacctcatctgtgcataaaatggctattatacatgaatgcagacgtttgaagttagaaaggaatataactcaaatagcaaaaggtcctaattacagagtttacaaataagcagttttattttcaaaagtacatagtaagtccagactgggctattgccaaagaactaatctttagtctacttcaacatgttacatggtattcctgactctacagactatcagcatctgtggaggttagctcctaaaggtcccaaagaacaggaaacatgcaggaataaaggactcctcatgaagagcaggtgggagcgagtgggcagg

SEQ ID NO: 1404 - DNA, 243 bp, Homo sapien
tgaaggggttcttggaagacctggcacctccagagcgcagcagcctaattcaggattgggaaacatctgggcttgtttacctggactatattagagtcattgaaatgctccgccatatacagcaggtggattgctcaggtaatgacctggagcagttacacatcaaagtgacttcactgtgcagtcggatagagcagattcagtgttacagtgctaaagatcgcctggctcagtcagacatgg

SEQ ID NO: 1405 - DNA, 168 bp, Homo sapien
aaaccactggatctatctaaatgccgatttgagttcgcgacactatgtactgcgtttttcattcttgtatttgactatttaatcctttctacttgtcgctaaatataattgttttagtcttatggcatgatgatagcatatgtgttcaggtttatagctgttgtgttt

SEQ ID NO: 1406 - DNA, 486 bp, Homo sapien
ctggacatacagaaattgttgaatttttgttgcaacttggagtgccagtgaatgataaagacgatgcaggttggtctcctcttcatattgcggcttctgctggccgggatgagattgtaaaagcccttctgggaaaaggtgctcaagtgaatgctgtcaatcaaaatggctgtactcccttacattatgcagcttcgaaaaacaggcatgagatcgctgtcatgttactggaaggcggggctaatccagatgctaaggaccattatgaggctacagcaatgcaccgggcagcagccaagggtaacttgaagatgattcatatccttctgtactacaaagcatccacaaacatccaagacactgagggtaacactcctctacacttagcctgtgatgaggagagagtggaagaagcaaaactgctggtgtcccaaggagcaagtatttacattgagaataaagaagaaaagacacccctgcaagtgg

SEQ ID NO: 1407 - DNA, 560 bp, Homo sapien
aaatatatgcttttctagaatttgatgtttgaccatttatgacttaattaccagagagccagtaaattaggacagtgtttcaacaagcctaggctatctcgtaagttgaaaaatatcccactatagttgcttcatgagtatgaagtaagatggcctctgatttacactggttcaatttacaaattttcaactttatgataggtttatcagggtactaaatgcatttcaacttgatagtttcaacttatgataggtttaccaggatgtagtcccactgttgaggagcatctatttaggagttaattactttagtaataagtggaaagtaagataccttgagtaatgtttgcctataaaattgtcagcgtatttttacactattggctcaagaatgttataatgctaagggacataagttggcaaccacttggtttttggaaggactttcggtattgtattagaagtctgccctagctgttaaatttctgggtatttatcctaaggaattaattaaagagttaattgttcctttcttcagtgggccattgttttagatattt

SEQ ID NO: 1408 - DNA, 360 bp, Homo sapien
ctgcctagttgtagttgacagacaactttataagctctagtcaaccctattgactaagcttctgaaccactagcatagttctagggtcaggcggatgcctactgtgggcaggaaagtgatgcatgcatgtgtgggagcagtgtcttaatgtctgaaatagtagccatgagctacatgtggctatggagcacttgaaatgtgggagtccaaattatcatgtgctgtgagtgtaaaataatatgtttctaagaccgtgtgtgaaagaatataaaatatctcattaaaaaatgtttatattgagtacatgttgaaataattttatatttgtgacacattgtgttaaataaaatattaaaattt

SEQ ID NO: 1409 - DNA, 208 bp, Homo sapien
ccagtccaacctgctcctcattattgtataaatgagcagaatcaatatggcggaagccagcttcaattgccaatttggtggcctctaaagctttacttttaggaacctctgcaggcgcataggtgccaaatcccaggacaggcatgaagtgaccatcattcagcttcacacactgatatttcgaatccatttctgtcactagcctggc

SEQ ID NO: 1410 - DNA, 404 bp, Homo sapien
aaaaaaaggaaaaagttttattacgaaactagtttgtataaaacagggttatacatatttttgtaagtttgtaataaaacagtaagaaaaaaaaggcagtaatagaaatctccaaaaggcaacctatcaaaaccaactggctgccactttgagtttggacagtagctgcataaactttgttcttcttgarcagtatttaataacatcattaatacattaacaacatttctataaagtaagacacattggtgctgaagtacaactggtggcctcttgatctcacctatgaggagagttctttacamawccacatagggaaaattgcagttgtaaggtgarctacacatctaaaatatgcagaggtaatagcattacatgttaaagtatcaagatatacacatttt

SEQ ID NO: 1411 - DNA, 623 bp, Homo sapien
  misc_feature (1)...(623): n = A,T,C or G
ccacttgttgagatatggggagcctacactccggagggstgtacctttagcactggccctcatctctgtttcaaatccacgactcaacatcctggataccctaagcaaattctctcatgatgctgatccagaagtttcctataactccatttttgccatgggcatggtgggcagtggtaccaataatgcccgtctggctgcaatgctgcgccagttagctcaatatcatgccaaggacccaaacaacctcttcatggtgcgcttggcacagggcctgacacatttagggaagggcacccttaccctctgcccctaccacagcgaccggcagcttatgagccaggtggccgtggctggactgctcactgtgcttgtctctttcctggatgttcgaaacattattctaggcaaatcacactatgtattgnatgggctggtggctgccatgcagccccgaatgctggttacngtttgatgaggagctgcggccattgccagtgtctgtccgtgtgggccaggcagtggatgtggtgggccaggctggcaagcccgaaaactatcacagggttccagacgcatacaaccccagtgttggtgggcccacggggaacgggcagaattgg

SEQ ID NO: 1412 - DNA, 171 bp, Homo sapien
gcggcgctgggggtgctggagtccgacctgccaagtgccgtgacacttctgaaaaatctccaggagcaagtgatggctgtaactgcacaagtgaaatcactgacacaaaaagttcaagctggtgcctatcctacagaaaagggtctcagcttcttggaagtgaaagaccag

SEQ ID NO: 1413 - DNA, 189 bp, Homo sapien
aaaagtcataagggttttattttgtatcatcaaaatattctataaggtcccaaatactctttttcaacccatgaacagtaagaatttgtgaattctgataatgaaaaaagttttcctccaggtatgtttgtttcacattcagtcctaaagccttgagctatgtgtacttccctcacacaggaacaccag

SEQ ID NO: 1414 - DNA, 564 bp, Homo sapien
  misc_feature (1)...(564): n = A,T,C or G
cctccccagcgcccaaaggtctattacaagtacctatagacttttcacatataagttctagtgggtacaagctttttttttttttttttttttttttttttctattgggkatttcattcattttggggggggaacaaattctacaaactgctttaatattgkcctttttttctaatattcacattaactttttatgtaaaacataccaatgcttttaataaagcttacataggaataaactattatagacctgcatagatataagtacccatgtattaatctacattaaaataatggattttattctgcgaaractccaagttgctcctgggkgctaagkgaagcacttagggaaatgtgttcagtctttgaggtcataggaacattarattatatcaaaggaaacctggagccatcagctaagtggcccttctgtcctgtagatacataaaaactaatgggctccgctatgcggctcactttctgctattagatactatgaggcactaanaaaaaactactgcctgcatcatatctttcttcggtttgagataaagagaatgg

SEQ ID NO: 1415 - DNA, 231 bp, Homo sapien
ctgcgcttggataacaagtaattcaacgcacgcacttaacagaaatgttaaactataacaagcaccatttgaggattaacaggaacatttttttgaagatttcaaacgaactcgactttcagtataattgtacctaaagtatttataaacagctcatcggagcctctatttgtcatagacttttgagttgattgttgggaccacataataggaccatttttttttgtcttt

SEQ ID NO: 1416 - DNA, 540 bp, Homo sapien
cttgatttaggatctgtggtgcagggcaatgtttcaaagtttagtcacagcttaaaaacattcagtgtgactttaatattataaaatgatttcccatgccataattyttctgtctattaaatgggacaagtgtaaagcatgcaaaagttagagatctgttatataacatttgttttgtgatttgaactcctaggaaaaatatgatttcataaatgtaaaatgcacagaaatgcatgcaatacttataagacttaaaaattgtgtttacagatggtttatttgtgcatatttttactactgcttttcctaaatgcatactgtatataattctgtgtatttgataaatatttcttcctacattatatttttagaatatttcagaaatatacatttatgtctttatattgtaataaatatgtacatatctaggtatatgctttctctctgctgtgaaattatttttagaattataaattcacatgtcttgtcagatttcatctgtataccttcaaattctctgaaagtaaaaataaaagtttt

SEQ ID NO: 1417 - DNA, 350 bp, Homo sapien
  misc_feature (1)...(350): n = A,T,C or G
ttnatcatctaactgtgggatctatttcatttctggaaataacacaacttagttctagggctttcatgcacatgaaatataaaacagcttagttgttctgaaaacatgacaatggttaattttattcaagtcccaacactgagttcagagcacttctccataggccccattaatctctccaggtttctgggagtatcattaaatccctcggcatccttaagaagcaggtgcttagcaaacatccagtttccaaatgagagtcagaggggcttgatcctgaaagtgtagtattttcctgccttgtcctactggtatagcttcttggacctaaaatctctctcctgctgagg

SEQ ID NO: 1418 - DNA, 425 bp, Homo sapien
tgctaggcagccttattttcataacccawttagggaaaggaaatttaggattttcaaggctacattaatttttcctccatcaaatcttgatttgttcttgataaaaatgagttcttttggggaaattctttctttagacaccaacttggtttttctcatcttccacagaataattgaacccctgacctctagatgttcaaaattccgcttcaagcctctgtcagataaaattcaacagcagcgattactagacattgccaagaaggaaaatgtcaaaattagtgatgagggaatagcttatcttgttaaagtgtcagaaggagacttaagaaaagccattacatttcttcaaagcgctactcgattaacaggtggaaaggagatcacagagaaagtgattacagacattgccggggtaataccag

SEQ ID NO: 1419 - DNA, 390 bp, Homo sapien
aaactcttgctattgaattgagatgattaaaatggtgacttaatccgtagttattttgcacccactgaaaggaaagtgctttccagaataatatgaagtatctaaaagtgtcaccttttcttgcctgatcaacaatttgggcttcctgtttgtacaaggggccatttggcatacctttcacagcttttatcaggccaagttaaaggctgactacattttttcatcatgaggaaagcagttgaaatgaggcatgagttactgtgcattgggattttagaacaattttcttgtgacagctctttttgtgaagttaggttcttaaaagtgcccatgatggtcacttaaaatgtgcagtaatagcactgccaggatcaagcatgaaaggctttt

SEQ ID NO: 1420 - DNA, 480 bp, Homo sapien
  misc_feature (1)...(480): n = A,T,C or G
ttgctgaacaatgacatcgttttctccaggggttgaaatccatgtccatggctgacaacccaacaaggctgggacccaaattcgtacagagatgaggcagagtggagagaaacaactctggctgagccagagtctccagccactacttcttattcctgggctttagctcttcggctgcattacgcaggaaaatgtaattttttttctggggattataaaattcatgtccctttgaccagtcgtagctggaagcgtatgcaaatatgtttccattgygattgaaacagcaagctgasatgggctgayctaactgttccgaagnttttagttttgktctggcatctttgycccagaagctgaatctaccatcagatcccacagttgcaagggtgccatgaacaggatggaacgccgattccatttacccgcataaatgycctgaggagctgaagtgttggttccattagatcgatgacattt

SEQ ID NO: 1421 - DNA, 453 bp, Homo sapien
aaactgattgaggtcacagtattttattatttggggtcctcaccacaggaaacactgcgatacaggggcaaaagagatggcagtgccaattaaattaatacaacaaaatcaatgcagcaccaaccaagactgccaggtctggtgtcatgggtatgcccagagcccaggagttcagaagggccctaagcctgatttaatgctctgctgttgatgtcttgaaattcttaacaatttttgaacaaggggcctgcgttttcacttcgcactgggccttgcaaattacatagcgagtgctcataaaagaactcagaaacgtggtacctctcttcctggtggatacaaataaagaaatctggatccaaagttgaaagttgctggcgatatcattcaagtaggactctaaatagtggattaagatgagggtgggcctgggtgaagattctttccagcttt

SEQ ID NO: 1422 - DNA, 542 bp, Homo sapien
  misc_feature (1)...(542): n = A,T,C or G
tttncttgaccactatacggcacaacctaggggstgtawaaaacctascrcaatgcagaagggtgaagcttcatgacaattggtctcggcaataatttgggggatgtaacatcaacgaatcagacaacaaaagcaagggaatacacatggnactaaatcagtgtgnggaaaaatatcccaaacaggcaaagcacaacatggamtagatatatgcacattnatggaccctgnaggcakkactcacaaacatactacctgggaagcamctggacctttaagggatgaggtagattcaacaaacagggcancgtatmttccactgggatagcattccagccttaaaaataangaaatcttgaaaagnactacaataaggacaaatctcgaacacattctgttaagtaaaacaagacaagccaaaaagggaaaactgtataattacacctatgtaaaatatttagtcaaactcaaagaaaccaagtgttgtagtctcagcagggcaccaagatgnaaacagtctctcatagnctgagatangcatc

SEQ ID NO: 1423 - DNA, 252 bp, Homo sapien
ttaatgccaaatggcaaagttgcatccgtggaaatggttaaatatcatcactgtcgggatgaacccctgcacgccctctatgacaatgtggagaaactctttccaggttttgagatagaaactgtgaagaacaacctcaggatcctttttaataatgctgtaaagaaacgtttgatgacagacagaaggattggctgccttttatcagggggcttggactccagcttggttgctgccactctgttgaagcag

SEQ ID NO: 1424 - DNA, 273 bp, Homo sapien
tttccactctgcacattgtagagggaacactctgtaggcccatgggtcccttactagagaggttgagtgaatttgccttcagttaacatgggaccttctgtttagcttcctcttgcttcccaaagattttaagcattttgtaaatgtataaactcacctctggtaacagtggcccagacgctgctttgtgctaaaagcatgggaaatgtaaaggcagtctttctctgggaaatggatgctattctattctgctgcccctacctgttcctgagg

SEQ ID NO: 1425 - DNA, 618 bp, Homo sapien
aaaaaccttgtatagcaaaataacttaaaaccctttgtgatatcatcttaccagtttatttggtaaaaacaaacagttatttggtatttgtcagaattcttcagtgcctgctattacagctattttccaattactaatttgattatactcactcaaggcagtgcaagatcttgaagtactttttagcagttaagtaatattgaattgtattgaatagtttacatagtttattctagtctttgaaaattactgaacatggacaatgtgcatgtcattgacatctgccttagaacttctgggacaatcctgattcgagagattctatcccattatttacatataccaaaaatactttgttaatttaatgtgttggcttcccaactcctgaacacgacacaattttattattagattttgtatggtgattttaggctatgaaaacatgatcattatatgtatatagatacatttttatttgttacaaatgtttgagcagctcactagcccacccctcctctattttgggtaagagaatttactaccttttttaactatgtagttgagagcaacatgtattttgttatttttagaatggtcagtatattgctataaaatttt

SEQ ID NO: 1426 - DNA, 565 bp, Homo sapien
gtggtagaaagagatgacggaagcacattaatggaaatagatggcgataaaggcaaacaaggcggtcccacctactacatagatactaatgctctgcgtgttccgagggagaatatggaggccatttcacctctaaaaaatgggatggttgaagactgggatagtttccaagctattttggatcatacctacaaaatgcatgtcaaatcagaagccagtctccatcctgttctcatgtcagaggcaccgtggaatactagagcaaagagagagaaactgacagagttaatgtttgaacactacaacatccctgccttcttcctttgcaaaactgcagttttgacagcatttgctaatggtcgttctactgggctgattttggacagtggagccactcataccactgcaattccagtccacgatggctatgtccttcaacaaggcattgtgaaatcccctcttgctggagactttattactatgcagtgcagagaactcttccaagaaatgaatattgaattggttcctccatatatgattgcatcaaaagaagctgttcgtgaag

SEQ ID NO: 1427 - DNA, 144 bp, Homo sapien
ccactagttatttttatgtaatcaattacggggtcattagttcatatcccatatatggagttccgcgttacataacttacggtaaatggccgccaccgcggtggagctccagcttttgttccctttagtgagggttaattgcgc

SEQ ID NO: 1428 - DNA, 214 bp, Homo sapien
ccactagttattattatgtaatcaattacggggtcattagttcatagcccatatatggagttccgcgttacataacttacggtaaatggcccgcctggctgaccgcccaacgacccccgcccattgacgtcaataatgacgtatgttcccatagtaacgccgccaccgcggtggagctccagcttttgttccctttagtgagggttaattgcgc

SEQ ID NO: 1429 - DNA, 253 bp, Homo sapien
  misc_feature (1)...(253): n = A,T,C or G
ccactagtccantttngtggaattctgaagccttaattgcttatatccatgtttctagtgaaatgagagggtataacaaaaaagagaacaggaggaaagcttcgctgtgcctgaggaaataatctagtcaaggcagcaagtctggatagtgctatagagatgagatacctgagcagttccagaggaagaggtggagatcagaggccagttttcagtgaacactgtaaagaaaagccagatgatgtgtcctgga

SEQ ID NO: 1430 - DNA, 232 bp, Homo sapien
aaattttactagtgttacttaatgtatattctaaaaagagaatgcagtaactaatgccctaaatgtttgatctctgtttgtcattactttttcaaaattatttttttctgtaaagtataatatataaaacttcttgcttaaattgaatttctatattagtggttaattgcagtttattaaagggatcattatcagtaatttcatagcaactgttctagtgttttgtgttttt

SEQ ID NO: 1431 - DNA, 734 bp, Homo sapien
cattatacaacactatattgccaggtcaaagagggcagggacgtaaatgtacactaaaatgcmaatgtatcccaaagagataaaacaaattccatttacagcatgaaggtttacaaatgtacacctgtacaaccaaggaaagcatcactactaaattagcaaggcttttataataaacattgaaasaagatttcctttcaaagtgtaaacttacatctattactacacacacaatgcatatatttatagaaagcaaaaagagctatctgaatatgtaatcatgcttaaatgctgagctatcaaattcacttttcagtggccccttttcatctctatctggttcctactttctgcctctatgaaaaagcaaaataaagctcaacacttcctcaacatgtctgtaattctataagcaaaacaaaatacaaatttccactctttctcattgcaaaccaaactgaaaagttaataagtgacttaacttttcatttagtgcacttaattggaagtgtcaccatgattttgtatttaactcttacaacaattacatatgtaagtatatacaatatttctgtacattgccagagacattttagggcagtaattgtattaaaaccacatctactgtaaataatgttaggttcttttcatctcaaaccactttattcttgcctacttactcgttatttgcatgatagtttgtgaattatcaaaatacaacttaactctttaaa

SEQ ID NO: 1432 - DNA, 542 bp, Homo sapien
tttaagaaagagcctttgagaaacatgcatacttttctcttttctcctatattcaatactcatatagcctaaaagatggaaactggttcaagaatttaaatgacttgttccctaaaaagttaatctcctcacctttgtgaaatatatcaagtgctttctataaataagggcaggaaatgctaacttcataagcatagtcctagtcattaaaataatttgatcatcttctaaaatttaagtatgatagtaacacagtaatatggaaaatctcaatatacttaacacttcctaaacagcacaatgaaatgttgttcaaggtctgaattaatttgctacaggacctaagcaagtctgtttgcttatcttttggctttaaaattctttaagtctaaaatggtgataattttagaataaactgacaatgtggggaacaaacttaaattcacaaacactacccatatgctcaaaaactctctgggataattagtttcttcattgtaactattgatgtactattatttcatctttccattagctctact

SEQ ID NO: 1433 - DNA, 175 bp, Homo sapien
ttaaattgattcaaaaaaacttgacacctgtcatgtaggccacaaaatagtagcgaactatactaagtggtatagcccactgtggagtgtggtcttttactcttccaaatagcccaagttggcaaaggttacttaaaaacctgccccccaaaaagctaacttttggtagattttt

SEQ ID NO: 1434 - DNA, 90 bp, Homo sapien
ttaatcactattgatggaagcttatattccttatgaatatatacatgtatgcatatatacatctctgtatgaatcactcaaagcaatttt

SEQ ID NO: 1435 - DNA, 153 bp, Homo sapien
tttacctttgtgctttgaaggttctaccatttakaaagtaaaaagccaacccacagaatggaagaaaagaggacagactctaacaagcgttcacaaagatggagagaaattgtaaccctcatatattgctggtagaattgtagaaagatgcag

SEQ ID NO: 1436 - DNA, 483 bp, Homo sapien
  misc_feature (1)...(483): n = A,T,C or G
tttttagtttaaagaagagttttgccacttaracangggagctwtgtctggaaaatacactgagttgaaacacttcatccttggaaggattatataagatgaacagytgtgataaatgtgtagattagagggatgtgaatgggcagttagtccagtgccctcatttaagaggccaagatcctgattcagaggaggcatcctttgcccagagctgcttagctaatctgaccaaatgttgggaaaaatgtctcacctaacccactattccttaattatggattttgtgaaaaacaatagaacatgttaatgagtaatttatattagttcgatgtattacaattttttagctttaaattacagytttcttataatgttgaaatgttttagaatcctttgaatctaagtatttgtttcctaaatgaaacatttgtacaacatttgatgtttttacttatgaaatattctcctcccccaagaaaattt

SEQ ID NO: 1437 - DNA, 171 bp, Homo sapien
ttttgccacctcaagaagccattttcttgtctgtttccttctttacctacccctacaacctatgaacaaataccataacttaaaaatttaggtagtctacaactcctacaaattttaagttcagagactacccaaagaactgtggaagatgcagcaatataaaagtttttt

SEQ ID NO: 1438 - DNA, 408 bp, Homo sapien
tctgagtggaggtaggctaacaacacattttgactttstcctcaaaggatagctttgaaaaacaagtgtaaccaattgttacaccaaattaaaatggcaatattaaatcggtaacaaaacgatccacattttatacaatattgtatttccaaacatacataggtcatgaaaatcagagaacctaatatagcaccgttgaaaccattcattatccttcatgtgtgtatgcaattcagaatttcggcagaagacaacaaatggaaaatgcctttcgtttctataaatcattttggatttcaattaaatctttgccttagtaaagggtattcttatctcaagatcaattagccgtttttagctccaccgttttggaagtaaaaatgatgagctacatctactttttaattt

SEQ ID NO: 1439 - DNA, 168 bp, Homo sapien
ttacacaacagctataaacctgaacacatatgctatcatcatgccataagactaaaacaattatatttagcgacaagtagaaaggattaaatagtcaaatacaagaatgaaaaacgcagtacatagtgtcgcgaactcaaatcggcatttagatagatccagtggttt

SEQ ID NO: 1440 - DNA, 307 bp, Homo sapien
tttcacatacgaagaaatcaactgtgattatgaagtgacagccagctaaatatgtcttgtattttctctcttcctttttttgcctaactcatcctttacttccattcctgcttccatggtaatgcaggctcaaataaattactaggatacaagattacttcaagcctcttttctgtggaactcataatatgataagcatttgttacaagattgcctgtagttgtttaggggacaaattatattagggaaagaaagtctttctttagttggttaaattttctattataattgggtactaaatttattt

SEQ ID NO: 1441 - DNA, 684 bp, Homo sapien
  misc_feature (1)...(684): n = A,T,C or G
ttaagttctggagtgttcacttctgagcctgaattccctcccctgcaaaatgggggaataccctcctcagagggtccctgcgagggtgaggggagattcagcatggcaggtgtgctgggcacggcagggcctgggaagggcagatcctttccccatccctgccacaaacaacccaaacctttaaaggagagcaatggccttgtgtcaaaaacaaaaacaaaacaaaaccctgtcctaggagactggggccctaatttctaatagcaagcctttatgagtccctaacactctactgggctgagtatctcacacgccagaggataacctgccttctgctcaccaccaccccgtagtagttgtcattgtgtccatttcacagatgaggcaaaggctcagaagagtcatgtgttaaaccagcttctagagcccatgcaggagctgcaggtgggagaatcacctctaggtgctcttcccatagaatcctcacctcctgagtgtcactcactcagcttccaatgggtgtgtgacctttgaccagctttcttcctctctgggcctcagtttcccacctggacaaagtaagaggtctcttggcttcangtaagttcttcctaaacttctttttccttttcatttgagcatcctcttcatttttgccacctctctgtcatttacaggcttttt

SEQ ID NO: 1442 - DNA, 166 bp, Homo sapien
aaaaaatcagcccctaatttctccatgtttacacttcaatctgcaggcttcttaaagtgacagtatcccttaacctgccaccagtgtccaccctccggcccccgtcttgtaaaaaggggaggagaattagccaaacactgtaagcttttaagaagaacaaagtttt

SEQ ID NO: 1443 - DNA, 194 bp, Homo sapien
tttgccctgtcaaaagaagagctaaagacagttatataaaaattaaggtgggctttcagactggctaacacaacaacattccatgagtagatggtaatttatttttgtttatccatttcgttgggagcaaggacaaaaatgtaaatctacaccttgcttatcaaaattgccgaaaaaagaatgctctgcctttt

SEQ ID NO: 1444 - DNA, 96 bp, Homo sapien
gagagtcgagagtgggagaagagcggagcgtgtgagcagtactgcggcctcctctcctctcctaacctcgctctcgcggcctacctttacccgccc

SEQ ID NO: 1445 - DNA, 365 bp, Homo sapien
gggatgagctgaccaagaaccaggtcagcctgacctgcctggtcaaaggcttctatcccagcgacatcgccgtggagtgggagagcaatgggcagccggagaacaactacaagaccacgcctcccgtgctggactccgacggctccttcttcctctacagcaagctcaccgtggacaggagcaggtggcagcaggggaacgtcttctcatgctccgtgatgcatgagggtctgcacaaccactacacgcagaagagcctctccctgtctccgggtaaatgagtgcgacggccggcaagcccccgctccccgggctctcgcggtcgcacgaggatgcttggcacgtaccccgtgtacatacttccc

SEQ ID NO: 1446 - DNA, 386 bp, Homo sapien
tctggaaagttcttgctcgggtcccttcacctccccgccctttcttaragtgcagttcttagccctctagaaacgagttggtgtctttcgtctcagtagcccccaccccaataagctgtagacattggtttacagtgaaactatgctattctcagccctttgaaactctgcttctcctccagggcccgattcccaaaccccatggcttccctcacactgtcttttctaccattttcattatagaatgcttccaatcttttgtgaattttttattataaaaaatctatttgtatctatcctaaccagttcggggatatattaagatatttttgtacataagagagaaagagagagaaaaatttatagaagttttgtacaaatggttt

SEQ ID NO: 1447 - DNA, 261 bp, Homo sapien; identical to SEQ ID NO: 288

SEQ ID NO: 1448 - DNA, 404 bp, Homo sapien
aaaaaaaggaaaaagttttattacgaaactagtttgtataaaacagggttatacatatttttgtaagtttgtaataaaacagtaagaaaaaaaaggcagtaatagaaatctccaaaaggcaacctatcaaaaccaactggctgccactttgagtttggacagtagctgcataaactttgttcttcttgaacagtatttaataacatcattaatacattaacaacatttctataaagtaagacacattggtgctgaagtacaactggtggcctcttgatctcacctatgaggagagttctttacaaaaccacatagggaaaattgcagttgtaaggtgaactacacatctaaaatatgcagaggtaatagcattacatgttaaagtatcaagatatacacatttt

SEQ ID NO: 1449 - DNA, 230 bp, Homo sapien
aaaagttctagtggtacggtaggagctttgcaggaagtttgcaaaagtctttaccaataatatttagagctagtctccaagcgacgaaaaaaatgttttaatatttgcaagcaacttttgtacagtatttatcgagataaacatggcaatcaaaatgtccattgtttataagctgagaatttgccaatatttttcaaggagargcttcttgctgaattttgattctgcag

SEQ ID NO: 1450 - DNA, 194 bp, Homo sapien
aaaaactccttttggtttacctggggatccaattgatgtatatgtttatatactgggttcttgttttatatacctggcttttactttattaatatgagttactgaaggtgatggaggtatttgaaaattttacttccataggacatactgcatgtaagccaagtcatggagaatctgctgcatagctctatttt

SEQ ID NO: 1451 - DNA, 106 bp, Homo sapien
aaagatgacaaatactggttaattagcaatttaagaccagagccaaattatcccaagagcatacattcttttggttttcctaactttgtgaaaaaaattgatgcag

SEQ ID NO: 1452 - DNA, 349 bp, Homo sapien
ctgcagatcctgcggaacgtcacccaccacgtttccgtgaccaagcagctcccaacctcagaagccgtggtgtctgctgtgagcgaggcgggggcgtctggaataacagaggcgcaagcacgtgccatcgtgaacagcgccttgaagctgtattcccaagataagaccgggatggtggactttgctctggaatctggtggtggcagcatcttgagtactcgctgttctgaaacttacgaaaccaaaacggcgctgatgagtctgtttgggatcccgctgtggtacttctcgcagtccccgcgcgtggtcatccagcctgacatttaccccggtaactgctgggcattta

SEQ ID NO: 1453 - DNA, 302 bp, Homo sapien
aaaaataatgtgcaagagcatcatgagaaagaagaggggtgaagagataatccagaggaacatcaaatgtaagagtatacactcaaagacaggtttaagaaagaccagtcagagaagtaaagaaaaaaatcaagcaagaataatgttgcaaaaattaacaagaaagttgcaagcccagagtggttagcaatgccaaactaccatgagtaagccacataaaacaagaactttgggttcaactgctttaacaatcagacctttagattcacataacaggagttacaaaattaagagcctctttt

SEQ ID NO: 1454 - DNA, 268 bp, Homo sapien
caagcgtaaaccgcgggagccgagcccagctaggaatgcagacctcctgaaaaccaagccgaggactgcggggtccggtgtccacgcagagtgtcagcttcctctggtgcaaccagcaagtcttccagtatgaatcccacagaaaccaaggctgtaaaaacagaacctgagaagaagtcacagtcaaccaagccaaaaagcctacccaagcaggcatcagatacaggaagtaacgatgctcacaataaaaaagcagtttccagatcag

SEQ ID NO: 1455 - DNA, 207 bp, Homo sapien
  misc_feature (1)...(207): n = A,T,C or G
ctgtcgagagcagccctgcccaagawtgncgggtgggggctggtgccaacgggttcccaaggscctttcmactttkgaakggctggarttcttgggaaaccmaaacsktgactacctgscttttttcttgggcatygacstgcttcatttccaaaratgatggkgcaggtgaccttttccatcgtgagctaaaaaaaggttaggagg

SEQ ID NO: 1456 - DNA, 181 bp, Homo sapien
aaatttctgtctgctaaaatctatcaaatacattaaggaaaagtcccacttggcacatctcccacaccagatgttaattattcatactgcatgactgaggattttggaggcagagagagattcatctgcaatatttggaacaccaatggaggtctacgtcaacacagaatttatacagcag

SEQ ID NO: 1457 - DNA, 309 bp, Homo sapien
aaaaagwtcagagttgaaatgcctttcaaccattkccttctgtggtcatttttcttgctgcctttttcacccaagattcagcagtcagatgtttactgcacacctattacctattatttgctgttcttgcatggttcaaaccaccattctgtagccacccatcctttgccttatctaacaaacatttttccaggaaggtggaaaaggaagtgttgctctcattgtgtgactcagtgctgctgtccatcccatggaaacatgggcacaatcaagtatttgtccagcctattgcaggcttttcctgacttt

SEQ ID NO: 1458 - DNA, 117 bp, Homo sapien
aaagactattgagaaataggaaggtattgagagattattgggtttcatcakagcagacttaagtagcctggttgattttagatttgtcacagcaaaatcatgcttggatgctcgagg

SEQ ID NO: 1459 - DNA, 575 bp, Homo sapien
  misc_feature (1)...(575): n = A,T,C or G
aaagaatgcataccagaacatttataagcagtggagtgagkthtattaagaatagtactactacaataaacgctggctaaataagaagtgcattatgtgaagcactatgggtggtatatgcttwgmcacatactctkgttaccttgaggyagatmacrcatgkgaaccaacttcggcatacattttcagttgctgcgaggaatcatgtgttttaacgaaatgcgtcagtatgaaaaacttgaaaatattcatgaatgawgaacgcmttaggaaaaaaatakstattctcatgcaattatgtacagtctcactgtgtaratctcaaggcaaggtttgcctcctgtaaaccagatcaaggtgctatgagagancgccytgncttattgcatttcttttctcctmctgcgccagcattatattgctctagnctttatttttgtgtgcacactgacatgccattaaaratgangractatctcacatgtagaaaargaaagnmcttggankctacctcaggtcgctaccacgctaagggygaattctgcaggatatccatcacactggcggcgcgattg

SEQ ID NO: 1460 - DNA, 444 bp, Homo sapien
ctgggggttccttccttcacgttgagaacctggagcagagagtctaccaacttaagaaatattagaaagagttcagcaaacagagtgagctgaagtctaatcctagaagtaaatccattcctacaagtcatcagcatcacttgggagcttgttagaaaggcaaattcttggttcagcctaacacctactaaatcagaaactctgggggcggagcgcagcaatctgtactttcacaagccctgcaggtgattctgagcctgtaaaatttgagaaccagagctgtcccccaggagataaattaacttctacttttttttgagctactgcattttgggatcttattgttttatcagcttaacatgcatcctgatatgattactcaggtatgtttcaaccaatgttggttaatgtattatccccaggaacttattactagaggagcag

SEQ ID NO: 1461 - DNA, 536 bp, Homo sapien
ctgcaaccctgggactgaccgggaggctctgattatttacccmaccacaggtaggttgtgttctgaatctcaggttcacaggttaaggttcagcatcctcatcctccacggggttggagttgttgctggtgatgaagggtttgggtggctctgcatagactgtgatcgtcgtgactgtggtcctattgaggccactggctgagttattggcctggcaggtatagagtccgctgttcttctcagtgatgttggagataaagagctcttgtgtgtgttgctggatgttcccatcaatcagccaagaatactgtgcaggtgggttagaggctgcatggcaggagaggctgaggttcacccctggacggtaataggtgtatgagggggaaatggtggggkcrtcygggccatagaggacattcaggatgactgrgtcgctgtgstyarcacttaatkcgttctggattccacactcatagggtcctacatcattccttgtgacaytgartagagtgagggtcctgttgtcattggacagm

SEQ ID NO: 1462 - DNA, 409 bp, Homo sapien
ctgakagaccaggagaagttccagatgcagagactgtgatgctcttgactatggaattattgcggccagtagccaagttagagacaaaacaggcataggtcccgttattatttggcgtgattttggcgataaagagaacttgtgtgtgttgctgcggtatcccattgatacgccaagaatactgcggggatgggttagaggccgagtggcaggagaggttgaggttcgctcccgaaaggtaagacgagtctgggggggaaatgatgggggtgtccggcccatagaggacatccagggtgactgggtcactgcggtttgcactcactgagttctggattccacatacataggctcttgcgtcatttcttgtgacattgaatagagtgagggtcctgttgccattggacag

SEQ ID NO: 1463 - DNA, 502 bp, Homo sapien
ccttcagcctggatcctttatattaagatcaatgaggaccatttctggaagatgtctggcatggtacagactgtctgaggccractgaacacaggcccttaccctgattttatcagtgaaaagctatgggactagtttccttacctctaaaatggagagaataatagaatcttccgtctaagactkctgtgagcataagccgagaaaatggaggtaaactgcttagcccaatacttggattatcgtaaatattcagtaaaactagccaccgttgttattgtaattattattttgtattttattatacatttcatggaaacttaaaagttagtgataatcacctcattttcagttgccttgctttcttcctgtaaattttattctctcttatcttgctcactgtctttaagcattgccagtttagtataattattttcccctatcctctataaaatcatatacaggatggatttgttgatctcagacatgttcactgagtttt

SEQ ID NO: 1464 - DNA, 294 bp, Homo sapien
ggcggctcggactgagcaggactttccttatcccagttgattgtgcagaatacactgcctgtcgcttgtcttctattcaccatggcttcttctgatatccaggtgaaagaactggagaagcgtgcctcaggccaggcttttgagctgattctcagccctcggtcaaaagaatctgttccagaattccccctttcccctccaaagaagaaggatctttccctggaggaaattcagaagaaattagaagctgcagaagaaagacgcaagtcccatgaagctgaggtcttgaagcag

SEQ ID NO: 1465 - DNA, 249 bp, Homo sapien
gtgcaggtcttcagccgtgacccggtaccccagctctaagggaggtggcagcatcaaaggctcccctcgcctgcgtggcagcaggggaatcttgcgtctacggggcctagagtcatgggatctgggggagccacccctgggggcaagtgtctgccctggtgctgtacctgccttgttttcacagcggtgacccgaagagacagcctgaggtccgtcctcactcactgtgtttgaggaactgtgggccag

SEQ ID NO: 1466 - DNA, 203 bp, Homo sapien
cctcagacaccttttaattgcttaggagaaaccattgtctctgactgcaggtttgaataagttgaagaccagagaaaagtacacactgggctacaaaggaatttggagatagccaaggaacaggatttcccctagcaagctaccttctgttcaaatcatgaaaaaagactatttccccttagaatagggaagcttgctatttt

SEQ ID NO: 1467 - DNA, 223 bp, Homo sapien
ctgtcagaacaggaacgacctgggttatggaagcccagaaagggaggaggacttcttttggtcccagtgaaagatgcttccagaatctgtagccttacttatttgcttggatctcactggaataacttggtggtgaggtcaccggttctggggtgatcactgggtttgctgcatagatgtttggatagatgacactcacattgcttgattgacagcagaccaa

SEQ ID NO: 1468 - DNA, 177 bp, Homo sapien; identical to SEQ ID NO: 1326

SEQ ID NO: 1469 - DNA, 185 bp, Homo sapien
ctgaagctgagaagtagcctatctatggargagacttttgtttgtgtttaattagggctatgagagatttcaggtgagaagttaaacctgagacagagagcaagtaagctgtcccttttaactgtttttctttggtctttagtcacccagttgcacactggcattttcttgctgcaagctttttt

SEQ ID NO: 1470 - DNA, 482 bp, Homo sapien
ctgaccaggagggacggttctgtggacgaggacttcgtagctgaggagccagatttctttttggtcccttcctcctggaatggaatcgtggcgctactgtggagatctgagttgatgtagcacctgcttcctcggatgtagtccgcaccccggaccagatgccgctcggtcgtgggtctggagaaccggtatgggggagaggagctctcttcaatgatcggaggaatccgctcgttactgaaataccggcaaagggcatcctcccctttcctgccatgacctcgaggtctggcaaaagggtccacaatccccatccagttcccatcagcaggcatggacaaaggccgtggcttgccttcagagggacgagaaagaaggtgacaagtttgatgagttctggaactttagtgaaccgttccctttatgtataacttagacctcacaataccacacccacttagacagaagcaataacaaatttt

SEQ ID NO: 1471 - DNA, 257 bp, Homo sapien
tgtgtgaacttagactkwtcaattcaacatttttaacrtatkaaatactattgtgaattcaatgaagtgttcttatgccactaactttaacctattcccttactcamggatgtaggyaaargatggtaacaatacactattkggcaagataatgtmctgacatmtytagcaatsttttttgmcagtggcttkcaactgmamwkaaskkammkaatattgytkctgtwsgtarattattattctgwywytaatcattt

SEQ ID NO: 1472 - DNA, 342 bp, Homo sapien
cttttgcgagcctctgccgcagcagctccgttttcacgcgcatctcgtttttgtgtgtgtgtttttgttttgtttttgtttttgtttttttgtttcagagaattggaagctaaagctaccaaagacgtagaaagaaatcttagcaggtaagatgggcgagctttccgtctcccgccccacgataatcgtatatttctactccgattcgccctttctgggttgagaagttcccccgtgacattttcttccgcacccggagagcagacattcgggagaagcggcctgggggaatactggagggattgcggggagatgcgtaattacgcgtgtgtttctttcttt

SEQ ID NO: 1473 - DNA, 526 bp, Homo sapien
  misc_feature (1)...(526): n = A,T,C or G
ctgctacatgtcttcacagcccaggaattcaaggcccaggtggcagcaggaagaaacagtggaaaagcaaggggaagagaaaagagaaaaaggagggggaaagtctgcataactgtcataacctctgcttctcctgctctgtaacaaacccacaaccaggaagagtcatggtctggaacaatcatgggaccccaaacgcctgtaggttttttaccaccaaacatcacccatggctgctctaagctgtcattttgttcccacagttacctagcatcacggatgcccaatttatggcccaggaaggctgacccaggctaagggcagtctcactccacagccatgcaatggacagtctgaatgtttcctaccccagacctttactgacctctactatttcctcctctgatataaaagaaaaacacttttaattttctnctgcatnctacatctcctnctaaaaantttggcctaattgncatcaaaaccttgtaggaatctgaaattttggttcttctgaatcttancc

SEQ ID NO: 1474 - DNA, 187 bp, Homo sapien
aaacttgtttgctgtgaacaattgtcgaaaagagtcttccaattaatgctttttatatctaggctacctgttggttagattcaaggccccgagctgttaccattcacaataaaagcttaaacacattgtccaaaaaaaaaaaaaaaaaaagccccykcccsgggggscckttmaaggggraawtccc

SEQ ID NO: 1475 - DNA, 474 bp, Homo sapien
ccattctctttatctcaaaccgaagaaagatatgatgcaggcagtagttttttcttagtgcctcatagtatctaatagcagaaagtgagccgcatagcggagcacattagtttttatgtatctacaggacagaagggccacttagctgatggctccaggtttcctttgatataatctaatgttcctatgacctcaaagactgaacacatttccctaagtgcttcacttagcacccaggagcaacttggagtcttcgcagaataaaatccattattttaatgtagattaatacatgggtacttatatctatgcaggtctataatagtttattcctatgtaagctttattaaaagcattggtatgttttacataaaaagttaatgtgaatattagaaaaaaaggacaatattaaagcagtttgtagaatttgttccccccccaaaatgaatgaaatacacaatagatgtacaaaaa

SEQ ID NO: 1476 - DNA, 401 bp, Homo sapien
ccttggggacagggcaggaggacgcacacctcatggacagggcggccagggctgagataccagcggggtgggtattcccggcgggtgcttacctccaacagtgtcttgtcagcaaaggccatgatgccctcaaagatgatgacgtttgcaccatacagtgttttctgtgaagaaacccaggagttgcggagcctggctcatgtgcctgcagccccccgaggccccctctgcagggccctggcctacccagtccttcttccggctgtgcgtggtgaagtcataaatgggcaccttgacactcttcccctgcttcagcttcttgagggtggaaatgatgaaggtcgaagtcaaaaggcatctggggtgggtcgaaagtttgaaagtttgcttgtggtgccggg

SEQ ID NO: 1477 - DNA, 753 bp, Homo sapien
  misc_feature (1)...(753): n = A,T,C or G
cagcatgcttaaaaagttggaggaattggaacagaaatacacctwmcaacctkrmcctnttaccaaaaacaaacnagtggtatkggamccsacctttmrkctttttcmacmacttatttcaaagytsrttkgtggkgaaaagmcacycyksnatscywccrcacccttgwaggcygttggacttrataacakknctgctnatnwntgtgaggggtgataytgatgrtgaaattgcacttagctgggttataattkgaaagtcaaagtcttatttgataaagatgtgaatgagagaaatacagtaaaaggatttaggaagttcaacattttgggcacgcacacaaaagtgatgaacatggaggagtccaccaatggcagtctggcggctgaatttcggcacctgcaattgaaagaacagaaaaatgctggcaccagaacgaatgagggtcctctcatcgttactgaagagcttcactcccttagttttgaaacccaattgtgccagcctggtttggtaattgacctcgagacgacctctctgcccgttgtggtgatctccaacgtcagccagctcccgagcggttgggcctccatcctttggtacaacatgctggtggccggaacccaggaacctgtccttcttcctgactcccccttgtgcacgatgggctcancttttcanaagtgcttgagttggcagtttttcttnttgtcacccaaaagaaggtctcaatggngggacccanaaccttt

SEQ ID NO: 1478 - DNA, 421 bp, Homo sapien
  misc_feature (1)...(421): n = A,T,C or G
aaacctatactcactttcccaaattgaatcactgctcacactgctgatgatttagagtgctgtccggtggagatcccacccgaacgtcttatctaatcatgaaactccctagttccttcatgtaacttccctgaaaaatctaagtgtttcataaatttgagagtctgtgacccacttaccttgcatctcacaggtagacagtatataactaacaaccaaagactacatattgtcactgacacacacgttataatcatttatcatatatatacatacatgcatacactctcaaagcaaataatttttcacttcaaaacagtattgacttgtataccttgtaatttgaaatattttctttgttaaaatagaatggtatcaataaatagaccattaaccaanaaaaaaaaagaaaaaaaaaaaa

SEQ ID NO: 1479 - DNA, 214 bp, Homo sapien
ggaaatatataataaaaatgttaaccagaaggtaaacttgagtgtaattgtcagacagacacacttttccaccagtgtatttgaattttagaccagtgaccctgttttgtggcattcatgcaaaacatgctgagggctttgttcatctggtcatcgtgtccaaatttcagtcatgtttgtagcaagattttggaagcattcatatttccttttt

SEQ ID NO: 1480 - DNA, 434 bp, Homo sapien
ggaggccgcttacgtaaagcccaggggacattcaacagcccctactacccaggccactacccacccaacattgactgcacatggaacattgaggtgcccaacaaccagcatgtgaaggtgcgcttcaaattcttctacctgctggagcccggcgtgcctgcgggcacctgccccaaggactacgtggagatcaatggggagaaatactgcggagagaggtcccagttcgtcgtcaccagcaacagcaacaagatcacagttcgcttccactcagatcagtcctacaccgacaccggcttcttagctgaatacctctcctacgactccagtgacccatgcccggggcagttcacgtgccgcacggggcggtgtatccggaaggagctgcgctgtgatggctgggccgactgcaccgaccacagcgatgagctcaa

SEQ ID NO: 1481 - DNA, 131 bp, Homo sapien; identical to SEQ ID NO: 1366

SEQ ID NO: 1482 - DNA, 324 bp, Homo sapien
tgctcgctcctcagaggctgaaaacatgagaagctaggtgtggtgaaaccaaagcagctttattgttcaaatgctaaagacgggaggatggactggctcaagccttaaagaaaccatctcgactttttgaactcagtgaacgggtttaaggaaaacgtgggaaatatgcaaaggtggtgcaggagggtgcaggtctgtgtgtcttattcccatggatatcttgagtaatcgcttgtccagaggtggggtttgtgtcatcctgaattcaacccagcaatggtagggtactgttcataactcaccctaagccagaagattcctcag

SEQ ID NO: 1483 - DNA, 393 bp, Homo sapien
atgtttaatgaatgatacaggatacatccctgttggaagcttgcaaaagacacatacactgtggtacatatttgatttaatagaagttgtttatcaggctatatatatatttgcccaaacatgcaccacaggataaaataactatttacataacatagggtatttaattgacatagactatcagctttgctgagagcagaagatggcaaagcaatactgcagcagaaagtggaacaactattctaaagcaatactttagatatatttttctagaatggatttattagattactttttggaaagcatttgacctaaattaaatatagagctctgaaacttagaataaaatttgcacttgctgaaacagaatactttgcataaaaataatccttt

SEQ ID NO: 1484 - DNA, 323 bp, Homo sapien
tttagatcagaaagtttgaggtcttcatcagcagacactcgtgcttctatttttcttgttttatcgaacagttctgaaactttgagaaaaaacttgcatatatctgtagaatcctgagttcctaaagcatataatgaagaaccaattctattgtaatcatctgcagcacttttgtgggatcttgtcattctatcagatttagcagatgcatccttaactcggttatgatattccaaaagaaatgttcgttcgtgctcaaagaaatcatctacatcctttactcctgaaacgattactccatctgctgatttaaccatgttttt

SEQ ID NO: 1485 - DNA, 405 bp, Homo sapien
aggagcgtcaggaaaacacgggcagcctgggctctgacccgagccactccaactccacggccacgcaggaagaagacgaggaggaggaggagagttttgggaccctctctgacaaatactcctcccggagactattccgcaaatccgcagcccagttccataacctgcggtttggggaacggagagatgagcaaatggaaccggagcccaaattatggcgaggccggagaaacaccccgtactggtacttcttgcagtgcaaacacctgatcaaggaagggaagctggttgaagccctggacctgtttgagaggcagatgctgaaggaggagcgattgcagcccatggagagcaactacacggtgctgattgggggctgcgggcgggttggctacctgaagaagg

SEQ ID NO: 1486 - DNA, 230 bp, Homo sapien
aaaaatatgtggattgtgcttgacgtagcaaatttcttctatctgcaaaagcccttttctcactacctcatatacacccctttgatatggcaccatgtttgaaattggagcgtacacacatagtcattggatttactgggattctctttgtgacaagtaggagccaaggggtcatgcagggaagcgaacgtgcccgataaggatttccttgttgccagagtgtttagcag

SEQ ID NO: 1487 - DNA, 273 bp, Homo sapien; identical to SEQ ID NO: 1424

SEQ ID NO: 1488 - DNA, 452 bp, Homo sapien
cctactgtgccccgtaggcaaagctctgaagatttcatcgaaaaatctgctgtcaatacgtagaaaagttcactatttcagtttcacagcaaaaaaggtggggggaggggggaacccaatagatatttaagtagatgctttccaatcccattcactgcattaattagcttacctcttatacagtacaacataaacattgcatgtttatttgtatgtaacacctataagcatatagcatctacattttaagtgtatttacaaattcaacaaaatatctacatataaaaagctttacttaaaattaaacttgatgcaagttatgagaaaccaatttattggcaaatgaaactgagcattccttcaaccataggttgttatagattttcatatttggaggtaacccatttgatagatattgtttatgaatacgatagaatatatatttacttttt

SEQ ID NO: 1489 - DNA, 653 bp, Homo sapien
  misc_feature (1)...(653): n = A,T,C or G
cctgctcttctcttcaaagcacttagtacacagggktacaggtgctaccacttggattccccagagcatggaagtctgatcccaggttgaacatatttcttctgaaaatgagcatcttggttctatagattcttatcttgctcacaggacttgctccaaaactgaattttcagaagcagcatgatagggaaagagatattcaactctgacagacaaggtagatcgaagcacccacactaatttctttcaggtgccccatgaggaagactgcatcatgtcacttccactcacttggggagattctaggactgagacacaaagttcccccagagtttctgctaatggaaggggaaacaggtggtttggaatggaaaggtggaaccaggtccacaaaatgtgctccctctgctcaagactgactttggctttcccaggtccccacttgactttcatataagctgagatgacctattacgggaaaaattagggaacacctaataaaaccaactttcaaaaactcctatttatcatggatgtgccacgatcgagagaatcnaacacnaactgnctgtnagagaggccttcattntgnctcatcttgagctaaaatcctgrcttgggatgccagaaancatgnccctcttntcggtttg

SEQ ID NO: 1490 - DNA, 363 bp, Homo sapien
  misc_feature (1)...(363): n = A,T,C or G
taacctgacaaaataaaacttagtaaaatctakaactgtttcttggcctacttgagaggaacttccatattttcacagccatctccgaaagcagcagttgctgtaaattaactgagacttggaaatggtgcagactgtcttggtagagctgttcttatagcacaattttatctggaaaataaacttgtaaatgcgtgctgtatattaatacatgtgtgcccatatttatttttattatctcctgccagtctttgctcaatgggagatgacagaccaacttctcaacgtgatttccccatttcattgaatgagatttatatgccacttatgaaaaaaaatactgctgngaaagaaatgtacttt

SEQ ID NO: 1491 - DNA, 163 bp, Homo sapien
taatcagcccctaatttctccatgtttacacttcaatctgcaggcttcttaaagtgacagtatcccttaacctgccaccagtgtccaccctccggcccccgtcttgtaaaaaggggaggagaattagccaaacactgtaagcttttaagaaaaacaaagtttt

SEQ ID NO: 1492 - DNA, 184 bp, Homo sapien
yattccccaggggaaaaattgaaagtcaaactattcaccaagagaatgcattgtctttgcaaatgagcctaagaatcagactttttataaatacatgttcaagtttcttgtggttctaaatggacactgagaactgaaactgtctacaccaagtttacaatctatattaactatcattwtacag

SEQ ID NO: 1493 - DNA, 273 bp, Homo sapien
  misc_feature (1)...(273): n = A,T,C or G
aggtaawttgtgatatttagtgcacatttacgtgtaggnccrtcttkaatggtaaagacagatacaagcctatggcacacttctccaaagcaagctatacttgagagccaattcccaaataagacagcagagatctgattaaatgcaactgtgcaaacattcaacagacatgttgaatgtaagacaaattatgattactgataatatgcaaatgtggtctataaatttatgaatgtgacttccaaggggaatatggtatggaagcccattttt

SEQ ID NO: 1494 - DNA, 343 bp, Homo sapien
ttggaaagcctatcactttctctcttcattctccagcccccacaccaagcacacagagcttttcagtgctttactcttaatggagaacataaccagggattatcaggtattccaacatgaaaaagaaagtccaatagaaacaagcaggataatcaaaccaggaggaagcagagactatatagagaaagaaaaaaagacacatgggaataacggcaataatactgacaatacacctcaccataaacttatcagaatgaatttgttggagaaatatatggaggggaggtacttgtgtgtgtgcacaggcactcatgtacacgtgtgtatgtgtatgtttttttaa

SEQ ID NO: 1495 - DNA, 378 bp, Homo sapien
tagcattcttccagccactctggcgtcactatgtgcttcacgacagaaatcgccgtcaggaacttcacggtgcgagtcactttgctggcaatgaggtgtgtgcacttctgtgcagactccgcaacctctccaccaagaatgtagagcttcttaatatactgttgaacctggacaggctcgaatccagtgaaaagcacaaaaggggtcaattctggagttagctttttagtgggaggtggtacgtcttcaattctggctcttttggaagaaggctggacattagctacttcattctgtttcagtttgggaggtagtcttatactcatcaacaactctgcagacacttttaagggaactctccaagcatctaaaagattt

SEQ ID NO: 1496 - DNA, 181 bp, Homo sapien
tggagaaggaagttttcctgaagagccagaatccttgctaagtcatttagatccaactgaccatctttatttctgtcaaaaatcttcatcatggtgccagtgtattcttccagtttagcctcagaaatggcctttttgtggtgaagaaagaggtctcggaggaagttgcggagctcagcag

SEQ ID NO: 1497 - DNA, 373 bp, Homo sapien
tggaagctgatccaccttgagatcaagccggccatccggaaccagatcatccgcgagctgcaggtcctgcacgaatgcaactcgccgtacatcgtgggcttctacggggccttctacagtgacggggagatcagcatttgcatggaacacatggacggcggctccctggaccaggtgctgaaagaggccaagaggattcccgaggagatcctggggaaagtcagcatcgcggttctccggggcttggcgtacctccgagagaagcaccagatcatgcaccgagatgtgaagccctccaacatcctcgtgaactctagaggggagatcaagctgtgtgacttcggggtgagcggccagctcatcgactccatgg

SEQ ID NO: 1498 - DNA, 337 bp, Homo sapien
gctcttgtagtgcttttcttttaagggagatgtagtaaaagggaaaatgtagctcttagtttacacttcaaagatgtgggggtctttcagagaactaagaataacagttttatgtgcagagagagtttgccagatctgaagcatatacctcattgactaggctgttactttgggataggttgcagtaccagccacagccagcagatagaggaaaagacacacataaactcgcttctgagcgtccacttctgcactctctgctctgctgttactcagcccctgagtctgactcatctctgcacaacctctctgtgccatgaagataagtcttccatgg

SEQ ID NO: 1499 - DNA, 314 bp, Homo sapien
catgcggagggactttagcatggctgataaggtccttcctaccattccaaaagaacagaggaccagagttgcacactttttggaaaggcagggcttcaagcagcaagctcttacagtatccacagatcctgagcatcgttttgagcttgctcttcagcttggagagttaaaaattgcataccagttagcagtggaagcagagtcagaacagaagtggaaacaacttgctgaacttgccattagtaaatgtcagtttggcctagcccaggagtgcctgcatcatgcacaggattatgggggcctgctgcttttgg

SEQ ID NO: 1500 - DNA, 321 bp, Homo sapien
cctgaaacctggtgggaagatgattgaaagtgttttagattcaacagattgactatgtatgacttatctattaaaatgaagaacttccatggtttaatagaatgaatgctgtattcaacaaggtcttccatccttcttataaatcttaagactgtgtttaagctttctttcacttttactctatcccttggaagttaattgggaataaaaagatttatcaatttagtcactataatttaaggccaggcatctgcttggaaatacaataaccacaattaatacttagagaaaattgtttcaacagattaactctgctatttt

SEQ ID NO: 1501 - DNA, 557 bp, Homo sapien
ctgctctggggaaaatggtggaggagccaggcagagaggaggagcagagtgctggcagtggaaagcctagctgagactggagatgcccccctgcccaaagcatctcagcgaggatgcttctccatatgggtgagccagcctagagacagaacaggggaagccagcgggtgctgcagcgacccaccgccccagaacatctgcatcttacatcaacaaaggtttatttctcattaatatccattgtgggttggctgccactctaaccctcgttgcctctccatctgggtcttgggtggcagagcagcctgtctctgtggcagaggaaaagagagcactgggcagcacaggctgactctcaaattttccgcctgaaggtgacccaagtcactgctcacatttcattgactaaagcaaaatcctatgcctgtgggtgagttgagcaacgtgatgaggtgttaacttcctacagggaggggctcaaatattgcccaacagtggtatggcccactgcctggggtggtcggtggaaggctggcaggacaagggagaccacgtgg

SEQ ID NO: 1502 - DNA, 249 bp, Homo sapien
cctgcggggaggcgcgctgcaagaacctgcccggctcctactcctgcctctgtgacgagggctttgcgtacagctcccaggagaaggcttgccgagatgtggacgagtgtctgcagggccgctgtgagcaggtctgcgtgaactccccagggagctacacctgccactgtgacgggcgtgggggcctcaagctgtcccaggacatggacacctgtgaggacatcttgccgtgcgtgcccttcagcgtgg

SEQ ID NO: 1503 - DNA, 302 bp, Homo sapien
ccaggacctcttttgggcatttcttcctaagtggaatacacaacagataagggagtaggggaggtaatacagggaagctactctttccagctcagaaggagttgatgaagcccatatatgcattcaagaagcccatgggatcctctagctgtggatagtggctaatgtggtcatccagaatcgacactgtggaccgcggcagcgttttcctgtacagctccaaaaactctggatagggatttacaggatccaatggcccatagataaaatgaatggggatagttacagaggcaagagctccc

SEQ ID NO: 1504 - DNA, 430 bp, Homo sapien
ccacgatatcaactatttggctttgtcaggtgttctctcaaaaattggcagaagtggtgagaatccgtatgccccgctgaatctcctggctgactttgctggtggtggccttatgtgtgcactgggcattataatggctctttttgaccgcacacgcactggcaagggtcaggtcattgatgcaaatatggtggaaggaacagcatatttaagttcttttctgtggaaaactcagaaattgagtctgtgggaagcacctcgaggacagaacatgttggatggtggagcacctttctatacgacttacaggacagcagatggggaattcatggctgttggagcaatagaaccccagttctacgagctgctgatcaaaggacttggactaaagtctgatgaacttcccaatcagatgagcatggatgattgg

SEQ ID NO: 1505 - DNA, 164 bp, Homo sapien
ccagtcaccttcaccttctaactaactagcctccggatgaggtggctgccaccaggcccgaatgatccccaggagcccagcttccaaaccccaacatcgaatcaaacatctccatccccaagtgcagtaacacacaaaaaccaaacactctgccctgggaaagg

SEQ ID NO: 1506 - DNA, 189 bp, Homo sapien; identical to SEQ ID NO: 1413

SEQ ID NO: 1507 - DNA, 268 bp, Homo sapien
ctgcacagaggggcacggaactccaaatcctggaatgcgggtcaataatgtgaattctggccctgaccgccagacacacagcaagcctgagtcatctgccgtcaccatgtcagccacacaatcctgtccctgggcaggctcggtggcaatgtctgtgattggcatctggtgcccagccagctcctcgctcagtacaatgttgggaccctttgctgggatgtcaaacaccagcacccggcctgaccacgttcccacacagatgaagtgg

SEQ ID NO: 1508 - DNA, 159 bp, Homo sapien; identical to SEQ ID NO: 1342

SEQ ID NO: 1509 - DNA, 234 bp, Homo sapien
ccattgtggagtacattatgaacacaatgtgcttgykaagtcttctctctcattttcagacagcaattgttaagagtcacacacacgtcccagacctaagcagcaactccagtgaatggtactcagacacactcacgggacagcacagaacttgattcttctttgtctgttgcccaaagaacctgttctttgagtctgttccaggtgacttgtaatgatacctcttacggtttt

SEQ ID NO: 1510 - DNA, 437 bp, Homo sapien
aaagcagtacatcttaatatgaagacaggaatttctatgatgcttacgaacattagactcaacatttttgcagccccctttcctggtctacattcacacaaacatgagacacagtcccaagggagaaacagatgctggaggagcatttagggccagagtggaggcacagaggaagctgggatttttcaactaccccctccttggttactcctgggattcccttaggatttcacggcacaaccagcgaagagtttgctcagattcacttcggagtagccacttcgggacaagaattgctctgctgtgttcttgagttttctgtagtcctgcagaactttgggggtaaaaaattgcttcttcaatttatctttctcatgatcggtagtaagtttctccagtgcacactccgcatcaaaaatgtaccggtaaaagcacag

SEQ ID NO: 1511 - DNA, 94 bp, Homo sapien
tgtgaagatggagtctgaggggggtgcagatgactctgctgaggagggggacctactggatgatgatgataatgaagatcggggggatgaccag

SEQ ID NO: 1512 - DNA, 493 bp, Homo sapien
aaaaatatgcattacaactggagttttccactgagaataagagtttggttttgacctcmcataaatccaagggttcttgaaaaaaaagttaatataaattctcaataactatatcattaataccttatgtatacataggagtttatataatgcatttaagtaacaaagaatgtaacatttattagccaccaagtaattaggagatagcatcaattatattgaaagaagatgagtttagatgcttatagtcaagggagttaattgaaattgaaagctattgtaggtggttactactattattatcaaacctgaaagttggaacatgtgaacttgatcctttgcacacataaaagttcacaaagctgcttttaatttgcctttgttctgtagtactgcttggtgaatcatgcactagtttgttgtaaaattcatgtaaacttttatgtatacaaatgtcagatcaagcacaggttttattaattatatatatttt

SEQ ID NO: 1513 - DNA, 510 bp, Homo sapien
aaatgaggattattgatagtactcttggtttttataccattcagatcactgaatttataaagtacccatctagtacttgaaaaagtaaagtgttctgccagatcttaggtatagaggaccctaacacagtatatcccaagtgcactttctaatgtttctgggtcctgaagaattaagatacaaattaattttactccataaacagactgttaattataggagccttaatttttttttcatagagatttgtctaattgcatctcaaaattattctgccctccttaatttgggaaggtttgtgttttctctggaatggtacatgtcttccatgtatcttttgaactggcaattgtctatttatcttttatttttttaagtcagtatggtctaacactggcatgttcagagccacattatttctagtccaaaattacaagtaatcaagggtcattatgggttaggcattaatgtttctatctgattttgtgcaaaagcttcaaattaaaacag

SEQ ID NO: 1514 - DNA, 511 bp, Homo sapien
  misc_feature (1)...(511): n = A,T,C or G
ctggagatcaggaatagaacctttccaagatatcataatattttctttataggaacactgagtaatggcaagaatattttgagcttttccatggttaagagcgatagtctcagaggctggagaaaatgttcattctgctcagtgatccaggagtgtgaggacagtagcttcctttccacgtccacaagacaatgacagatgtgtttccttctttgccctttctagggatctttctagggatgttgattctctcacaatatttcaatgtcccatttctgtgtttcttctccctccaggggctgatttacgattacatgagtcttgtcacaataatttcctcctttaacatcaaggacaagttgatcactgagataagagctgatagttccatttttattcagtctccacttctgcctgaattgcccatgttcagtccatagagctactttagctccaggtgtggtcccggccnccatcacatcaagaactggtttcactgggccttggatta

SEQ ID NO: 1515 - DNA, 176 bp, Homo sapien
aaaggggaaggkgaracttaaaagtattcccaactagattatctacaccaatacattggaactctatattttgctttcattttgtcttaaaaaaatgaaatagcaacgctctatcagtcacacagaggacatgcaratttagcagtattgatattatactctatcttgttggattt

SEQ ID NO: 1516 - DNA, 309 bp, Homo sapien
ctggggaaaaccgtgcattacctgcccatcctgttcatcgaccagctcagcaaccgcgtgaaggacctgatggtcataaaccgctccaccaccgagctgcccctcaccgtgtcctacgacaaggtctcactggggcggctgcgcttctggatccacatgcaggacaccgtgtactccctgcagcagttcgggttttcagagaaagatgctgatgaggtgaaaggaatttttgtagataccaacttatacttcctggcgctgaccttctttgtcgcagcgttccatcttctctttgatttcctggccttt

SEQ ID NO: 1517 - DNA, 182 bp, Homo sapien
ccaacatctaatttttttactttttaattatagctgttgtgactgatgtgagatggcatcttactgtggtttttgcttgcatttatttatttgatgattagtaaggatgagtgttttttcatatacttgagtgtcttcttttgagaaaatatctgttcatgtcctttgccttttcttgattt

SEQ ID NO: 1518 - DNA, 548 bp, Homo sapien
cctgagggagagggaaaagcggatacccacctgtgtcgctgtttgcgtgccaagtccaggaacagtccatacagccctgctgcatcccacgacgctgtcacaaagcaggagttcatccgaggccaaggtgttgtcatgagaatattcgttaaagtagggacgctgactttgttcttgggcagattctcttcctgtggagtatccagcctgtttgcctagttttcctgttcttctggggtctgatctctatctgttttactgcagtccagttaccaaagtggtataagtaaaattgaaagaattctaaataccttttccccccacgttagctgcctcacgttaatgtggtcttacggtctgcaaataagtgttttgatgatttggcgactgcagttacccatactagctctcctaccactcactactgacagttaattattatcgaatatccacccacccagggtgagttataagttataccaggtgttttggttaataatactaatgcaattaatttactggttactctctcatcttaaagtaatcag

SEQ ID NO: 1519 - DNA, 491 bp, Homo sapien
ctggtgaaggacggcttcctggtggaagtgtcagagagctcccggaagctgcggcacgtcttcctctttacagatgtcctactgtgtgccaagctgaagaagacctctgcagggaagcaccagcagtatgactgtaagtggtacatccccctggccgacctggtgtttccatcccccgaggaatctgaggccagcccccaggtgcaccccttcccagaccatgagctggaggacatgaagatgaagatctctgccctcaagagtgaaatccagaaggagaaagccaacaaaggccagagccgggccatcgagcgcctgaagaagaagatgtttgagaatgagttcctgctgctgctcaactcccccacaatcccgttcaggatccacaatcggaatggaaagagttacctgttcctacttgtcctcggactacgagaggtcagagtgggagagaagcaatttcagaaactacagaagaaaggatcttcagg

SEQ ID NO: 1520 - DNA, 169 bp, Homo sapien
ctggtactgtcgatttggaaagctggctggaaaaaacttattcatgaaggggctgatggtgtgggacagggccaggattcccagcacgaagaaatacatggacagcaggaggttgatgtactcctgggagaatattttgaaaaagaggtagagccccaagagtgtgcag

SEQ ID NO: 1521 - DNA, 293 bp, Homo sapien
aggacgacgctgtcrgargcagggagagcaaattaccacagcttcttggcccagttctgcccttctttgctttgggattgcactgggccatcagctcatgccaggctatgggggcagccagttggcattgctccccagactgaacagaaacctggccgccggatgggacctcctttggcacagacttgactgtgtaactgcataaactgcagtagcatcattgccctagatgccccaggagacctggcaccatgaggattacagacagtggaatcttactgtcatctggacag

SEQ ID NO: 1522 - DNA, 386 bp, Homo sapien
ccacgtgggactttgaagacagcacaacacagtccttccgctggcatccgctccgggccaaggcggagaaatacgaagacagcgttcctcagagtaatggagagctcacagtccgggctaagctggttctcccttcacggcccagaaaactccaagaggctcaagaagggacagatcagccatcacttcatggtcaactttgtttggtagtgctaggagccaagaatttacctgtgcggccagatggcaccttgaactcatttgttaagggctgtctcactctgccagaccaacaaaaactgagactgaagtcgccagtcctgaggaagcaggcttgcccccagtggaaacactcatttgtcttcagtggcgtaaccccagctcag

SEQ ID NO: 1523 - DNA, 178 bp, Homo sapien
aaaaagcctatcccatactgaattgtgggaacctatgaagtgtctcttaatgtcaattaaaagtaacagtggctgcagatattgatttctgaaagtacatgagaatttgtctctaactatggttgaaacaacaaaaccaaatctgaatcaggtagaggtctaccagacacaaactctg

SEQ ID NO: 1524 - DNA, 319 bp, Homo sapien
wycacagcwgaaatggggcactgaagtgtggagscacakaatgcgggagggcagaaccacagacaggaggctgagattgacctcctgagtgcaagctggtctccccttcacctcctgcaccctacgcagatggtgcttaccataggattgccgtaaaacagagacacgcaccagcgagaaactttagcccttagtatcccatcctcaggacagaatcactcttaaacatgttgaaatacatctgcttagagcttttctatgtgtctatataatgtatgcataatatacaattagaagcatgtgattttataacattttt

SEQ ID NO: 1525 - DNA, 467 bp, Homo sapien
ccagactagacagagatcaggtcatcaggggagcttccgagcttcagcaaagcccacaggtagctctgcgaactcagaatgctaccctaccttccctgcaggccgctgttcatgtctggactcctgggggcgctatttaatgtttacccccatctccagtgccccctccaaggctgtgcagtgtcttggggctctcagggccaacatcgaagagatgggggccacctcttaacacctggcaacagtctcccctcatcctgattcctgacaacagacaaaacaccggtttctagggtttatctgtttgttttttgagttgagggttcctcagggccttggcattgctagtgatggtcccctttgctgtgtgagaaccccctcaaccccttcctcctccctctggggatgaagtgggagtatttggctccccatttttgacaaaagggctcagtgcagggaggtggagg

SEQ ID NO: 1526 - DNA, 439 bp, Homo sapien
aaactgtttactggagaaaatcctcgctcatgtccatttattgtttttttctgtactgtgatttgtttcaagcttaggaaaactagtatattagagtatgttctaggaaattaaaagatctggttagagtaaaaagttctttttaaggttcttaactaattttttcacaactaagaaaataaatgaagtattcttaggctgaaattcatcttattttatcataaattagattgtaggggcagcctacatttttgtgtatgtgtttttatttcttaaatgattgtgtgagcctggtgacattttatggttcttgtgatctaaactgtttttccaattcacatcttttgtcgtgaagtgatattatactagagtactgtttgcattgtaaaaatgctttgctggtgctctggcattttgtctttatctcatcacctaattt

SEQ ID NO: 1527 - DNA, 609 bp, Homo sapien
  misc_feature (1)...(609): n = A,T,C or G
ctggagaacttgggctccattaggtgcaatcgttggagtaattagcccatcttttacatttcttgccacaaaatctcgaagagctgccatttcaggttcggacagtgaatacacatgtccactgggaatactgtgtgctccaggtatcatttctatgtgagggtcaaccaggcggtgatctgggtagacgtgctcatctactggagtgtacacattctggacatagtaatacctcactggttggtaaactctgtatccatctactggataatagagtggcggttgtggtgctggtggtgggagcgatggtggtattggagaatacatccggcagtggtagcggcagtattcagaatcaaagacgatagatcgagtgctccatgtgatattgggatcatgtgtgctcagccagcgaacccctaggacgacagggaagaatggagactgagtcacatcaaatgacagcacctctcggtgatctcccaggtcaactatcaggtcgtgagtttcgtggacaactgggcccgatgctatggggcgcccatcaattgcttccacaagtattggacccgcccgggcggncgctcgcaagggccgaaattccagcac

SEQ ID NO: 1528 - DNA, 393 bp, Homo sapien
tgatgtaatgaattcatatttattgatacagaaaaatatgatataatccatctaaaaagcaagttacaaaacagtgtacagtgtaccatagtacctatgaacacaattagtgaagtaatttgcagagctataataccaaatcagaaattattttggtaatgaatttatgattttcctcgttttctgattttttccatgatctcatatactttattctcagaaaacaaaagacaaaaccccacacatacacaaaaataaacgagtaacttctttacaaccccagaggctaagtcagtgggaaaagagggaaatgaatggttatgagcataaacacagggacaaataaaagaagtttggagcacagagaacaattcacaaatcagaagtcatttt

SEQ ID NO: 1529 - DNA, 143 bp, Homo sapien
atccgatagaatccagttcaatgaccttcagtctttactctgtgcaactcttcagaatgttcttcggaaagtgcaacatcaagatgctttgcagatctctgatgtggttatggcctccctgttaaggatgttccaaagcacag

SEQ ID NO: 1530 - DNA, 636 bp, Homo sapien
  misc_feature (1)...(636): n = A,T,C or G
gtggagaagcggcttggtcgggggtggtctcgtggggtcctgcctgtttagtcgctttcagggttcttgagccccttcacgaccgtcaccatggaagtgtcaccattgcagcctgtaaatgaaaatatgcaagtcaacaaaataaagaaaaatgaagatgctaagaaaagactgtctgttgaaagaatctatcaaaagaaaacacaattggaacatattttgctccgcccagacacctacattggttctgtggaattagtgacccagcaaatgtgggtttacgatgaagatgttggcattaactatagggaagtcacttttgttcctggnttgtacaaaatctttgatgagattctagttaatgctgcggacaacaaacaaagggacccaaaaatgtcttgtattagagtccaattgatccggaaaacaatttaattagtatatggaataatggaaaaggtattcctgttgttgaacacaaagctgaaaagatgtatgtcccmnctctcatatttggacagctcctaacttctagtaactatgatgatgatgaaaagaaagggacaggtggtcsaaatggctnttgagccnaattgtgtaacatattcagtacccaatttactgngggaaacagcc

SEQ ID NO: 1531 - DNA, 194 bp, Homo sapien
aaaaggcagagcattcttttttcggcaattttgataagcaaggtgtagatttacatttttgtccttgctcccaacgaaatggataaacaaaaataacttaccatctactcatggaatgttgttgtgttagccagtctgaaggcccaccttaatttttatataactgtctttagctcttcttttgacagggcagg

SEQ ID NO: 1532 - DNA, 300 bp, Homo sapien
ccatacaaggtaattttgacaggttcctgggattaggacatgggcatcttgggaggccactactggcctaccacaactgggcagcaaaactattacaccctccggtataatagttttggtgtttcaatgactgggaggaaaagggttggaattttttgctttggggtccctcttaaccttgtatttttaaggtctgggactcaccaaccctccccttccaaccagagaaactcactgcagtatctccttgaaagtctggtgacgagtctgtctaagtgctggtgagaggcacaggaccaa

SEQ ID NO: 1533 - DNA, 521 bp, Homo sapien
gttcctttgcaccctgtagatgttctaggatagttgatgcatgttactaaattacgtatgcaagtctgtgagtgcgtctgaggggacatcgccaaggactgactgagacacgatgccgagacctcaagccctgaggggcagtcccaaaacccttacagtgaagatgtttactcattgcccccacctctggtccacactagaaagaagctcgccccacctccacctgtgagatccgtgaattctcggaatggcaggggaagccttgcactaggttgcagagaagcatcctccacatcctgtgtcagaaaccctggtctccgtggcacttgtaactcaccgtgctgtcttctggtctgtgtgtgttcttcaagccagctctaggcttcaggccgagccaggttcacactcagaaagatgtctccccatccccattcggggctgacgatggggggctgatggctgcccctgcgtggcctgagtcctggtccctctgaggcagttgacggggcagtcagattttt

SEQ ID NO: 1534 - DNA, 181 bp, Homo sapien
actcaagaagatgtatttaatgcttgacaataagagaaaggaagtagttcacaaaataatagagttgctgaatgtcactgaacttacccagaatgccctgattaatgatgaactagtggagtggaagcggagacagcagagcgcctgtattggggggccgcccaatgcttgcttggatcag

SEQ ID NO: 1535 - DNA, 544 bp, Homo sapien
aaaataggacactaaatcctactctgaaaggtggtttgatcaggactaaagagaatgtatgtagagtgctttgtgcaacgaattgtggggagcttggacccaataaggtagccagaattacccacaccatcatcatcttcaccaccatcattattgttatcgacatattccaatacacttctgaagggctggaagagagaaatatgtttgtgcagacaggcggcagcagtatttgatccaccaccacagctccaccgcttgggggcagtactgatccacctgtgctcccctccctgccccagcctggaaagctaatttcagactcaaaaaaatcaagtacagagcagcgcacccactccaatgagtcatccccgcccactctagacaacagcatgctcatgactcaaactatcttcgtgaatggttcaaaatatcaagaattggtttccatagtttcttgactaaccagacacaaaatttcccctacatgcagagattcatgtctcaacttcaactgtacattaaactcaaccgggaaactttt

SEQ ID NO: 1536 - DNA, 591 bp, Homo sapien
ctgagttaagatggtaaagccaatattattttaggaggaaagaggacgaaggccaatgaaccaacatctgcctgctatctggtgcatcacccaaggtgaccaatggctgggcacaaataaacttctcttttgctagccacagagttgctcactgtggcaagcctgagctggtcagaacacctgtgtgtgtgttcctgatacacactaaccacaataagcaagtctgcacacatctctatgagccccatgcaaagacaagacattcccaaagatcagtcactagagtgcaacaacgaaattcaagatttgaccaaaacagaccctgctgcctcctaaattgccaattgcctctcaaaaacttacagaaaaagggacattataagaattcatagagggagagaagaaaaagctgctactcctagtcattagtacaatgtgctgtgttaattagatacctctatataaattagaaaaagtgctttacttgcatgcttcaataaaatgaatactgagtgtcgtagtgttagatctgtacagatataaattttttgcagctatataaaagtgtataagatgggcttttgccatttt

SEQ ID NO: 1537 - DNA, 341 bp, Homo sapien
acttcgggcctccctctccctgtgcagaccggttgaataaatgataaaattactgtttgtgtcctctgtgaagtctggattaatggaaaaaaggatttgtgaggctagtcttaggctgtagccaatctggtgtgctttttgtgtcttcctgtatggttccatgataaggaggaataccttaggatagaatgcaagcctaggaccccataagcctgttgttcaagccaaccagcaaactgggcagtaacaaacattgctgcaggtttccattttgttttacgtccttgggagcttgaccttgtaaccacgtggcagtaccttcttttggcctctgccatttt

SEQ ID NO: 1538 - DNA, 363 bp, Homo sapien
ggacctgactttgagtccatcagagacaaagtgagtgagatgcacatacagtgtttccagacctgactcagcccatctgtctgttaggaaactttatgaagacgccccccagaattaaaccctaattcaaatgtctcactctgaatagagaccttctgaaataatcttggtatagagacccagacacgtgccttttgccttaaaataaaaatatttagcccatgttgttttatgtatctgtctttcagttagttttgaaggcccgcacggaaaagtggggcctgtgcacctgaaaagaaatgtgtatgttatgtggttgttggtctttcctactagagttatcttgataattgtgaagagtgg

SEQ ID NO: 1539 - DNA, 371 bp, Homo sapien
ctgtgggggtccttccagagaggagctgagatacgcctacctggaggggcccctgggcctggaggggctcctcagtgtgactgggtgaagtgttttcagaggaccagggttgaggttgggggcatctcatccagaccctgccggcatctgccccagaacccaagggcccctccttcctccctcctcaatggaaatgctggagatgtcctcagtcaccctctgagcactcacacatcaccccttatttggaaatttttctcactctaaccttccttcctgctgcaccttctgccccatccccaggctctggcctctctctctcctcttctaccctttagcaggtaatgactcagttcccactgaggagccag

SEQ ID NO: 1540 - DNA, 403 bp, Homo sapien
ctkgacgtgatggagcaggtgagcagtgcccgtggggcttgccagagggctgaggaggaccctctctaaccagctccctgtcccccttcttctgtagcttgagttgaagaagacactgctggacaggatggttcacctgctgagtcgaggttatgtacttcctgttgtcagttacatccgaaagtgtctggagaagctggacactgacatttcactcattcgctattttgtcactgaggtcagcaatgcaccgttggtttcatgtttcatactgtttacactagcactgccctttttggcttaatttagttcattttgtacctaactgagaactgtgctttctgatgtagtgatgacaatgacagatactcgtttaccaaaaagcaccttctgcctgcagcag

SEQ ID NO: 1541 - DNA, 428 bp, Homo sapien
taaaacaaaactaaagaagagaaaatatattctcgtaaattatctgaacttaaaagatggaagcctggagatagatttgtgataagccattgctgagtacatcctagagttcttgataatttcagttggttaaattacaatagtttgctatttcctccctcacattttatgttctacagtatctagctgcttgggttttcctgtataccatggggcttctgtcatctgggctttactcagtggcatattccctctgcctaaaactctcctcccctctccaccttagaagtagcttttcctagaacggttttcccagggtttcacctaaggtgatagtacaatctacagggacctgcacatgaagacctttgcatacatgccaggaagttggactttatctttggaaaaagggagcctttgaaggtttt

SEQ ID NO: 1542 - DNA, 345 bp, Homo sapien
awttaaatgcttagcaagcagcaattccacgatggtcaaattcctaatatgagagaagtagaaataggaaaaataggtcaccctgatacttatgttttcattttgcttaatatacgtttgtatatttcaatataacattaatagatatcgtgtcccttcacagttctaaagtagtaagcaaaatgaattaatttaacctatgcaattaaaaccaatttggaagaatattgaggtagcacactgttacgggaattagtatgactcagtaatgcagttgaaagttagtggctcctaatccagtatgaatcatggagatgagagaaatgattagataaagagatattt

SEQ ID NO: 1543 - DNA, 420 bp, Homo sapien
aatattgaatttctagaagcagtatattgcttactgcttcttaattacgttatagatgaggtggaaatgataaaaactaaagaagcaagattaatctttaacacacatttcaggctgttgtaaaagaataaacaatgcttcatataaacttctagcaaatgacttcctaatgaggtcttgaaacagtctttagggcacggaatgtcatcacataattaagcagctttaagcctttattaaaaggcttaaagtcgcaaacaatgaaatctgaaacaaactgtaccatattaaactttttgatgatatttcaaattcagtaaaagaaaaaaaggatggttcagaataacatcacgtattctaatcctgaaacacataacaaatgcatctgaaacagcaattcttaaaaaggttttgcccttt

SEQ ID NO: 1544 - DNA, 306 bp, Homo sapien
ctggcttcactcctactccctctctgctcgcagcacgtcggccgccagctctttgatgtgttcccaggcccgctgcacatgggcagattccaccgtgcgagaacagatggcaaagcgcaggacaaacttgtccctgaggtgacatggaaccaagtggatttttttggcactgtttattctttgcagaagagcttcattcactttgttggaaccctttagccgaaagcagacaagccccagaatgacttccacacagatttcaaagcggggatcctggcgcaccagtgactcaaactcatgggacag

SEQ ID NO: 1545 - DNA, 110 bp, Homo sapien
ctgctccgggccttcatcctgaagatcagcgtgtgcgatgccgtcctggaccacaaccccccaggctgtaccttcacagtcctggtgcacacgagagaagccgccactcg

SEQ ID NO: 1546 - DNA, 239 bp, Homo sapien
aaagaaatatgacacggtgttggatattctaagagacttttttgaactcagacttaaatattatggattaagaaaagaatggctcctaggaatgcttggtgctgaatctgctaaactgaataatcaggctcgctttatcttagagaaaatagatggcaaaataatcattgaaaataagcctaagaaagaattaattaaagttctgattcagaggggatatgattcggatcctgtgaagg

SEQ ID NO: 1547 - DNA, 527 bp, Homo sapien
aaaaattccagttgagatttttctggttctctgtataaagattgactggaacatatacattttggggtttatgtttggagactttggctcttattcaaaccttccattttagttggcttcttctgacagtgcttcagcatggaagcaaggagggggcctcattactgccaggtaagggtaaaaatctagtttctctgctgggtctccattgtcactaagaaaggaatggctctgttattgctgggcagggttggctgttccaactgataatcctatgtctgggagggctaggagtgcctccttgctgttcctcttgttgtttccactgacagtggagtggccttgttactgctgggtggtggttgagagttctggctctctactagggaggacacaacctcagtgtagagaggcggggataccttgttactgtcaggcacaggcggaggtccagtctccttactccacctacccaacagggtagcttgaggcacttcattattgcctagtgagagtggaagtttagg

SEQ ID NO: 1548 - DNA, 333 bp, Homo sapien
ctgtgggcggagctagtaggggcggggctacgtgattgacacttctctcctcagacttcaagggctaccactggacccttcccctgtcttgaaccctgagccggcaccatgcacggacgcctgaaggtgaagacgtcagaagagcaggcggaggccaaaaggctagagcgagagcagaagctgaagctataccagtcagccacccaggccgtattccagaagcgccaggctggtgagctggatgagtccgtgctggaactgacaagccagattctgggagccaaccctgattttgccaccctctggaactgccgacgagaggtgctccagcag

SEQ ID NO: 1549 - DNA, 438 bp, Homo sapien
ttgacagtgtacgctggagcaggttccagggtggggctgccctgccgcctgcctgctggtgtggggacccggtctttcctcactgccaagtggactcctcctgggggaggccctgacctcctggtgactggagacaatggcgactttacccttcgactagaggatgtgagccaggcccaggctgggacctacacctgccatatccatctgcaggaacagcagctcaatgccactgtcacattggcaatcatcacagtgactcccaaatcctttgggtcacctggatccctggggaagctgctttgtgaggtgactccagtatctggacaagaacgctttgtgtggagctctctggacaccccatcccagaggagtttctcaggaccttggctggaggcacaggaggcccagctcctttcccagccttggcaatgccag

SEQ ID NO: 1550 - DNA, 204 bp, Homo sapien
aaaactaagttattccaacactaaaagcatacaacagcatgccaacagtaatatattattctccaagactttacctatgtaagtgttcaaaactctgcagcattaaacaacgtgtatgcaaattgttatggatacatttcagaatctaagaaatcaggcaagtgcttaaaaggccaacggtccaagggattacatctgcagttt

SEQ ID NO: 1551 - DNA, 132 bp, Homo sapien
ccatctgtggatttgtctgtgcacctattggctcttctagctgactcttctggttgggcttagagtctgcctgtttctgctagctccgtgtttagtccacttgggtcatcagctctgccaagctgagcctgg

SEQ ID NO: 1552 - DNA, 433 bp, Homo sapien
ctgaatagaggtcaacacagttgcgatgttgagggatggtctccaagcaccttttggtggcaatttgagaacatccagacaaatccttccagcagaatcaatgtttggatgataaattggagtgagaaatcggatctgaggaggttcaaatgggtacctctcaggaatgataacttctagcttaaaaacacctttctcataaggtgtgttggctccacctaatatttgagctcgcaggtcatccatttggtctttatcttgccaacatgtgatgcctgggggtggctctgtggctaacatgtgcagctctctcttcagacgtgaagctctctgcatgatccccaagtagaaggaaccacacacagttcactgctccacactaagagctgsctgggatgcactgagctgacacccctcacaacgcagcaacgcg

SEQ ID NO: 1553 - DNA, 316 bp, Homo sapien
gagcaaggtctgctgagaacagacccagtccctgaggaaggagaagatgttgctgccacgatcagtgccacagagaccctctcggaagaggagcaggaagagctaagaagagaacttgcaaaggtagaagaagaaatccagactctgtctcaagtgttagcagcaaaagagaagcatctagcagagatcaagcggaaacttggaatcaattctctacaggaactaaaacagaacattgccaaagggtggcaagacgtgacagcaacatctgcttacaagaagacatctgaaaccttatcccaggctggacagaagg

SEQ ID NO: 1554 - DNA, 542 bp, Homo sapien
  misc_feature (1)...(542): n = A,T,C or G
aaaggaattattctggcagcacatgtagtattcttggatgatcttgctgctcttatttctccttttgtgtgtgtgtgtgtgtgtgtggctatgggttttcatttgtaactccatctgcttargagagtgggctctctataagggaacctgctgtaaacttcattgcagcaaggatgtagagagaaataggacttaattccactaggggctctcatctcacaccttaaggaggagatttctagaaaaactgggccagattttctttgytctccatcattttaatgtggcaggctgytcagttttcttactcttacctatgwgatatttcttcgtaacgtgtccaaaaagaaaaaagacccaatcagtgtctcttgactttgttctttgatccctcagtttcttcttgatttcagcatgtgtccgggttcctaattttgggtatgagttagcaaatttaaccattgtgtttgtgccctacccaggggactccccagtttctgacttgaagtagactganaagaatccacgaggngctattttgg

SEQ ID NO: 1555 - DNA, 117 bp, Homo sapien
ctgtctgtggcttcccatgtctttctccaaagttatccagagggttgtgattttgtctgcttagtatctcatcaacaaagaaatattatttgctaattaaaaagttaatcttcatgg

SEQ ID NO: 1556 - DNA, 111 bp, Homo sapien
ctgctgcagccgcagtttctcatccggagtgtaccccgtcatgtcgccgctggtaccaacgcaaaaggacacggcgcaccctcgaactacggactagttacttaagcgcgc

SEQ ID NO: 1557 - DNA, 454 bp, Homo sapien
cgaggactgatcctctagtactaagtgactggggatattacaytarccaacattggttgatacatacctkartmatcatwtgaggaygcagtgataarsgsatawwmywgtatsatccyaacaygyactarctcaaaaactagtgggggcggattgatctcctgtgggacwkcacatgscctgaaagtgaacatgmtcmtratcacctgcagrgcttgagatggyccmcatkgcwgcactccgccccyacaktttttgawtcwacwggagttaggswgmtyctwgawttakcctttctacctgcctccygakagrwgcwcwygastwggakgaatssattgackkctaagrttakacttccactaactctgtacgmtgarctcttactaatattcgttaccacgctaagaggctctgctccaggatctcatcgcgactggaaggaacctccagc

SEQ ID NO: 1558 - DNA, 404 bp, Homo sapien
aaagaagtgcagttgatatctaatttacacagtgaaactagtgatagaaaataactaatgaaaaaaaatcagagactggtttccaattgattgacacctagatctgtcagcctctcttaaagaaaggggaaggagaaaaaaaatctcatcatggaaggcagacaagagtccacctgacagaggtggaatctgatggaatctgaccccatttcatgataaacgagaggaaacataaatgccatctcaaatactaaagcgatgtagtgtagcatgagtgactcaatgcaaattcacagaggaaaagaagttacggcttaggaagtaggacaataaatacaaatatttcatcttatttaatggtgcatgacttcagtgaaactaccctttgcaatgcaataaatttt

SEQ ID NO: 1559 - DNA, 266 bp, Homo sapien
aaactatcagaagagatgagagggaattgatctacaatactagaattttatgtgcagacaaatccacatctggaaatgaaatcacagtaagatattttcgggagaccaaaacataaaaattgctagaataaatttgccacgaacgagtaactagacattagaaattgactacatagatatagtaatactaaaagtgctgaaaacaagcaaacacaacacacacattctcaattctttttttttctatcaaatatcttcaacttttt

SEQ ID NO: 1560 - DNA, 142 bp, Homo sapien
aaaactcagtatcttctgaaccagaggcatttctgattagcccttccctacctattttcctagtatcactctttaatcagcttggggaggtggcagcatttcatggcctccgtagtaactcacaatgcttcctggggtattt

SEQ ID NO: 1561 - DNA, 381 bp, Homo sapien
aaacactaaatgaagcttctcacaatttctaattataaacaaaaggctgaaaacagtatgggaaacaaagtttcaaaacaaagaaaagttgagtaaaaggtgccccctctatggctcatctgaaagaaacattttactcagagaggcaaacatttctgatctaggagtaagtttcccactcactttgcaaggacccactcattctgcagaaagacctacaagtctttctggtctcaattgcaaagtacgtgaaaatgtgtatgaaagatctaaaagctaaatattagaataaggctaattgaaatcaaaattgtgtgctggtctaaatatacatcttcggcttcttcctttttagtaagtatttttatttcagatgtattt

SEQ ID NO: 1562 - DNA, 368 bp, Homo sapien
ggagaaaggagaaccgtacatgagcattcagcctgctgaagatccagatgattatgatgatggcttttcaatgaagcatacagccaccgcccgtttccagagaaaccaccgcctcatcagtgaaattcttagtgagagtgtggtgccagacgttcggtcagttgtcacaacagctagaatgcaggtcctcaaacggcaggtccagtccttaatggttcatcagcgaaaactagaagctgaacttcttcaaatagaggaacgacaccaggagaagaagaggaaattcctggaaagcacagattcatttaacaatgaacttaaaaggttgtgcggtctgaaagtagaagtggatatggagaaaattgcag

SEQ ID NO: 1563 - DNA, 411 bp, Homo sapien
  misc_feature (1)...(411): n = A,T,C or G
accwtrsaactgcawttattacctatgctagntttggataagaamtgkycwtayatgtgakagcaagagggcacyarawswrcttsaacaccaawgggcmktactwtatakawmcgawgggcatgctwtmatgaccaactgrmtgactgtttgagaatggacaargtgctagcgctaaacctgtccttcttgaacrtggcttgactaacgkcwttgatacgttrccttcakkasaatactattactasactttgktgcttgattaccgactggtgcactcttgmtctcacctatgargacagtgctttacacaaactcrtakggaaaattgnntttgtmctgtganctactcatcygaganctccctaagggctaacattncatgtttccgtctcactagctacacgttct

SEQ ID NO: 1564 - DNA, 602 bp, Homo sapiens
  misc_feature (1)...(602): n = A,T,C or G
ctagttttaagatcagagttcactttctttggactctgcctatattttcttacctgaacttttgcaagttttcaggtaaacctcagctcaggactgctatttagctcctcttaagaagattaaaagagaaaaaaaaaggcccttttaaaaatagtatacacttattttaagtgaaaagcagagaattttatttatagctaattttagctatctgtaaccaagatggatgcaaagaggctagtgcctcagagagaactgtacggggtttgtgactggaaaaagttacgttcccattctaattaatgccctttcttatttaaaaacaaaaccaaatgatatctaagtagttctcagcaataataataatgacgataatacttcttttccacatctcattgtcactgacatttaatggtactgtatattacttaatttattgaagattattatttatgtcttattaggacactatggttataaactgtgtttaagcctacaatcattgatttttttttgttatgtcacaatcagtatattttctttggggttacctctctgaatattatgtaaacaatccaaagaaatgattgtattaannattt

SEQ ID NO: 1565 - DNA, 473 bp, Homo sapiens
  misc_feature (1)...(473): n = A,T,C or G
ctagtccagtgtggtggaattcatccagggggctacccctggctctctgttgccagtggtcatcatcgcagtgggtgtcttcctcttcctggtggcttttgtgggctgctgcggggcctgcaaggagaactattgtcttatgatcacgtttgccatctttctgtctcttatcatgttggtggaggtggccgcagccattgctggctatgtgttnagagataaggtgatgtcagagtttaataacaacttccggcagcagatggagaattacccgaaaaacaaccacactgnttcnatcctggacaggatgcaggcagattttaagtgctgtggggctgctaactncacagattgggagaaaatcccttccatgtngaagaaccgagtccccgactcctgctgcattaatgttactgtgggctgtgggattaatttcaacganaaggcgatccataaggagggctgtgtggaga

SEQ ID NO: 1566 - DNA, 53 bp, Homo sapiens
  misc_feature (1)...(53): n = A,T,C or G
ctagttattaatagnaatcaattncggngtcattagttcatagcccatatatg

SEQ ID NO: 1567 - DNA, 136 bp, Homo sapiens
  misc_feature (1)...(136): n = A,T,C or G
ttattgatttttttttttcactttccccatcacactcacacgcacgctcacactttttatttgccataatgaaccgtccagcccctgtggngatctcctatganaacatgcgttttntgataactnacaaccctac

SEQ ID NO: 1568 - DNA, 192 bp, Homo sapiens
  misc_feature (1)...(192): n = A,T,C or G
ttgngtctgtgtgagnnggttgaccttcctccatcccctggtccttcncttnccttnccgaggcacagagagacagggcagnatccacgtncccattntggaggcaganaaaagagaaagtgntttatatacggtacttatttaatatccntttntaattanaaantnaaacagttaatttaattaaagagt

SEQ ID NO: 1569 - DNA, 575 bp, Homo sapiens
  misc_feature (1)...(575): n = A,T,C or G
ctagttctgtccccccaggagacctggttgtgtctgtgtgagtggttgaccttcctccatcccctggtccttcccttcccttcccgaggcacagagagacagggcaggatccacgtgcccattgtggaggcagagaaaagagaaagtgttttatatacggtacttatttaatatccctttttaattagaaattaaaacagttaatttaattaaagagtagggttttttttcagtattcttggttaatatttaatttcaactatttatgagatgtatcttttgctctctcttgctctcttatttgtaccggtttttgtatataaaattcatgtttccaatctctctctccctgatcggngacagtcactagcttatcttgaacagatatttaattttgctaacactcagctctgccctccccgatcccctggctccccagcacacattcctttgaaataaggtttcaatatacatctacatactatatatatatttggcaacttgnatttgngngtatatatatatatatatgtttatgtatatatgngattctgataaaatagacattgctattc

SEQ ID NO: 1570 - DNA, 392 bp, Homo sapiens
  misc_feature (1)...(392): n = A,T,C or G
ctagtccagngtggtggaattccgccgccatcatgggtcgcatgcatgctcccgggaagggcctgtcccagtcggctttaccctatcgacgcagcgtccccacttggttgaagntgacatctgacgacgtgaaggagcagatttacaaactggccaagaagggccttactccttcacagatcggtgtaatcctgagagattcacatggtgttgcacaagtacgttttgtgacaggcaataaaattttaagaattcttaagtctaagggacttgctcctgatcttcctgaagatctctaccatttaattaagaaagcagttgctgttcgaaagcatcttgagaggaacagaaaggataaggatgctaaattccgnctgattctaatagagagc

SEQ ID NO: 1571 - DNA, 390 bp, Homo sapiens
gaaggacgtttgtgttggaagccctggtatccccggcactcctggatcccacggcctgccaggcagggacgggagagatggtgtcaaaggagaccctggccctccgggccccatgggtccacctggagaaatgccatgtcctcctggaaatgatgggctgcctggagcccctggtatccctggagagtgtggagagaagggggagcctggcgagaggggccctccagggcttccagctcatctagatgaggagctccaagccacactccacgactttagacatcaaatcctgcagacaaggggagccctcagtctgcagggctccataatgacagtaggagagaaggtcttctccagcaatgggcagtccatcacttttgatgccattca

SEQ ID NO: 1572 - DNA, 383 bp, Homo sapiens
  misc_feature (1)...(383): n = A,T,C or G
ctgcagcttctgctgctgaggccgggattgctacgactgggactgaaggtgaaagaggtggaatccgaagtcctgggactgcgggatgctaaacattgaaagctgggtgtaggcactgcagggagagtgtggaggtctgacagggtaggaatatgtgggagggctgggctaggaatggccttggaggctggcctgtgtggatatggcaccaattctaccctgctcctcttttccttttcccagactcagacgatgccctgctgaagatgaccatcagccagcaagagtttggccgcactgggcttcctgacctaagcagtatgactgaggaagagcagattgcttatgccatgcagatgtccctgcangggagcagagtttgg

SEQ ID NO: 1573 - DNA, 149 bp, Homo sapiens
cctccagagcctctctagtggcagagcagctcacactccctccgctgggaacgatggcttctgcctagtacctatccttgtgtttctgatgcagtggtagcattggttcaagttctctcctgctgtggtcagagttgcttcgatgttgg

SEQ ID NO: 1574 - DNA, 143 bp, Homo sapiens
ctgccaggctgaaaagaagcctcagctcccacaccgccctcctcaccgcccttcctcgggagtcacttccactggtggaccacgggcccccagccctgtgtcggccttgtctgtctcagctcaaccacagtctgacaccagag

SEQ ID NO: 1575 - DNA, 112 bp, Homo sapiens
ctgcatccaccctctttcagggggtagagccactatacttctcatgtagatcagccacattgtcactggagactcggatccagccatcctcccgcacgtggtagaggttgac

SEQ ID NO: 1576 - DNA, 198 bp, Homo sapiens
ccagtatgtccccaggattatgtttgttgacccatctctgacagttagagccgatatcactggaagatattcaaatcgtctctatgcttacgaacctgcagatacagctctgttgcttgacaacatgaagaaagctctcaagttgctgaagactgaattgtaaagaaaaaaaatctccaggcccttctgtctgtcagg

SEQ ID NO: 1577 - DNA, 444 bp, Homo sapiens
cctgcctggagccccagatcaccccttcctactacaccacttctgacgctgtcatttccactgagaccgtcttcattgtggagatctccctgacatgcaagaacagggtccagaacatggctctctatgctgacgtcggtggaaaacaattccctgtcactcgaggccaggatgtggggcgtcatcaggtgtcctggagcctggaccacaagagcgcccacgcaggcacctatgaggttagattcttcgacgaggagtcctacagcctcctcaggaaggctcagaggaataacgaggacatttccatcatcccgcctctgtttacagtcagcgtggaccatcggggcacttggaacgggccctgggtgtccactgaggtgctggctgcggcgatcggccttgtgatctactacttggccttcagtgcgaagagccacatccagg

SEQ ID NO: 1578 - DNA, 294 bp, Homo sapiens; identical to SEQ ID NO: 1031

SEQ ID NO: 1579 - DNA, 295 bp, Homo sapiens
  misc_feature (1)...(295): n = A,T,C or G
ccacaaagccattgtatgtagctttagctcagcgcaaagaagagcgccaggctcacctcactaaccagtatatgcagagaatggcaagtgtacgagctgtgcccaaccctgtaatcaacccctaccagccagcacctccttcaggttacttcatggcagctatcccacagactcanaaccnngctgcatactatcctcctagccaaattgctcaactaagaccaagtccccgctggactgctcagggngccagacctcatccattccaaaaatatgcccggtgctatccgcccag

SEQ ID NO: 1580 - DNA, 166 bp, Homo sapiens
cttctttattggggacatgtgggctggaacagcagatttcagctacatatatgaacaaatcctttattattattataattatttttttgcgtgaaagtgttacatattctttcacttgtatgtacagagaggtttttctgaatatttattttaagggttaaatcac

SEQ ID NO: 1581 - DNA, 449 bp, Homo sapiens
  misc_feature (1)...(449): n = A,T,C or G
ctgaggcaacagaataaatgcagaggcattacaatgaatcccacttaatataaagaactatacagaccaacacttctctacaaaatttttttttcctcattgccagttaaatacagagttttactttcatagcttaacaatgaagggtcatacactgaagccaatacatatacctagcatttcagtctaagcttgtccacgtacatagctgaagtcaattacaaggtttggcctagaaatgctaggggaacttctttgtagtttttacaggtattaaacttcatcttgcacactgaagtcatcatacatacagggcaaaatcagagcttttatatttgcgtttattcttcatttaactttttataacactactatagtttattaaaacaaaaaacaaagagcaagtagtgagcatattangattacagtcctttcactcattcacacct

SEQ ID NO: 1582 - DNA, 302 bp, Homo sapiens
ccaatgggctttgctgtagcttgctgaaatcaccaagcaggagagatttaaccagaggcgatgtgtccagtcaccagcatagagccatcctctgtgtcaccatccacacgcagggccttctggcagacctcatgcaatgccctccatgttaatattcatcagaaaatggataattaggggggccagcaaaaatatcaagggtcaaatatcgcacatttctgtttaggccatctatggctttcatctcctctgaagtcaactggaattcaaacacctgcacgttctgtctgatgcgctgctca

SEQ ID NO: 1583 - DNA, 170 bp, Homo sapiens
ttcctgctccgtgggaaccacgagtgtgccagcatcaaccgcatctatggtttctacgatgagtgcaagagacgctacaacatcaaactgtggaaaaccttcactgactgcttcaactgcctgcccatcgcggccatagtggacgaaaagatcttctgctgccacggagg

SEQ ID NO: 1584 - DNA, 368 bp, Homo sapiens
ccagacgtggtggctcacacctgcagtcccagcaccttaggaggccgaggcaggaggatccttgaggtcaggagttcgagaccagcctcgccaacatggtgaaaccccatttctactaaaaatacaaaaaattagccaagtgtggtggcatatgcctgtaatcccaactactcagaaggccgaggcaggagaattacttgaacgcaggagaatcactgcagcccaggaggcagaggttgcagtgagccgagattgcaccactgcactccagcctgggtgacagagcaagactccatctcagtaaataaataaataaataaaaagcgctgcagtagctgtggcctcaccctgaagtcagcgggcccagg

SEQ ID NO: 1585 - DNA, 392 bp, Homo sapiens
caaccctctctcctcagcgcttcttctttcttggtttgatcctgactgctgtcatggcgtgccctctggagaaggccctggatgtgatggtgtccaccttccacaagtactcgggcaaagagggtgacaagttcaagctcaacaagtcagaactaaaggagctgctgacccgggagctgcccagcttcttggggaaaaggacagatgaagctgctttccagaagctgatgagcaacttggacagcaacagggacaacgaggtggacttctaagagtactgtgtcttcctgtcctgcatcgccatgatgtgtaacgaattctttgaaggcttcccagataagcagcccaggaagaaatgaaaactcctctgatgtggttggggggtctgccag

SEQ ID NO: 1586 - DNA, 158 bp, Homo sapiens
cctccactgccagcctatggttgttcgccaccaagccaggagtgctgcaccgcccagtggtccccctcgggctccaggcccccactgagaccctctcggaggcagaagcacttcacccctcagagtcctacaagtccaaccagtggacctggaattgg

SEQ ID NO: 1587 - DNA, 85 bp, Homo sapiens
ccaatgtacatggtggactatgccggcctgaacgtgcagctcccgggacctcttaattactagacctcagtactgaatcaggacc

SEQ ID NO: 1588 - DNA, 369 bp, Homo sapiens
  misc_feature (1)...(369): n = A,T,C or G
ccaggctaccttcccactggagacaggcagggggacaggtgctaagggacctggcaggcagggctggcaggccccatggcgcctgttccagcagatgacaagcccaggtcagggtagagcgggcaggaggggggacgagggctcccacaacatgattttgtgtaaaatatggcagcgacacacgctcagggccgggaggtgggggttagggtggggacggcggcaacatcgtgtaaaaaagtgtcccagttcccatagcaaagagagctgtgaccgggtgttcagagcttctccagtacaagggggaaagccgcccggcgggggcggcgggcagggacatcatttggtttcctggtgctgtcngtccga

SEQ ID NO: 1589 - DNA, 361 bp, Homo sapiens
ctgtagcttctgtgggacttccactgctcaggcgtcaggctcagatagctgctggccgcgtacttgttgttgctttgtttggagggtgtggtggtctccactcccgccttgacggggctgctatctgccttccaggccactgtcacggctcccgggtagaagtcacttatgagacacaccagtgtggccttgttggcttgaagctcctcagaggagggcgggaacagagtgaccgagggggcagccttgggctgacccaggacggtcagcttggtccctccgccgaacagtacaaagggactcaggctgttatcataggactggcagtaataatcagcctcatcttcagcctggagcccag

SEQ ID NO: 1590 - DNA, 434 bp, Homo sapiens
  misc_feature (1)...(434): n = A,T,C or G
ctggagaaggtgtgcaggggaaaccctgctgatgtcaccgaggccaggttgtctttctactcgggacactcttcctttgggatgtactgcatggtgttcttggtgctgtatgtgcaggcacgactctgttggaagtgggcacggctgctgcgacccacagtccagttcttcctggtggcctttgccctctacgtgggctacacccgcgtgtctgattacaaacaccactggagcgatgtccttgttggcctcctgcagggggcactggtggctgccctcactgtctgctacatctcagacttcttcaaagcccgacccccacagcactgtctgaaggaggaggagctggaacggaagcccagcctgtcactgacgttgaccctgggcgaggctgacnacaaccactatggatacccgcactcctcctcctgagg

SEQ ID NO: 1591 - DNA, 439 bp, Homo sapiens
  misc_feature (1)...(439): n = A,T,C or G
gctttcgccagaaaatgttgcatgtcaaacaatatgtgatccatactgtgtgtcgtccttgggggtttatttgactttgtcacaatgacagccaacagtgagactgataagcctgtaaaaataaaaaaataagactaatcaaatagacatggcattttaatctcaaagtgcaaaatcatctaactgaaaatgacggcattgagaaattccagtggttaaaaatgaatcaaaacttcattacgcaggcagtggaagtgtgttgaaagatttaccaggggtgtcaagttttagacactcagaaaggcaccattctagccatcttgattggataacatgtatatacttatgtccctacgatattcaaaagataatactgttttagtacaaaacaatcaaacaaggcaaagantcaaaaccaagccaacccaaatatccccag

SEQ ID NO: 1592 - DNA, 74 bp, Homo sapiens
  misc_feature (1)...(74): n = A,T,C or G
tttttttttctaatgttcacagtccctgctttatttccatttgttcacacacnctttaaaaaaaaaaaaaaaaa

SEQ ID NO: 1593 - DNA, 288 bp, Homo sapiens
ccatccgaagcaagattgcagatggcagtgtgaagagagaagacatattctacacttcaaagctttggtgcaattcccatcgaccagagttggtccgaccagccttggaaaggtcactgaaaaatcttcaattggattatgttgacctctaccttattcattttccagtgtctgtaaagccaggtgaggaagtgatcccaaaagatgaaaatggaaaaatactatttgacacagtggatctctgtgccacgtgggaggccgtggagaagtgtaaagatgcaggattgg

SEQ ID NO: 1594 - DNA, 455 bp, Homo sapiens
ccacacagactcaccaagccacagacttgtcttccacaagcacgttcttaccttagccacgaagtgaccaagccacacgtactaaaggttgaactcaaagatatgtacagggtattaaacaaataccaaggggaacagttaacttcaatacaaggtcaaaatcagcaacaagttctacaatccagtgctgatatcagatacaagcttcaaggacaatttcttttcgaaggcttattccagtttcgtgaggctagcatgaggtgtgtgcatttgccaggggcaaatttctattctcaattaacccatgcagcaaatgctacgcatctgctgagtccgtttagaagcatttgcggtggacgatggaggggcccgactcgtcgtactcctgcttgctaatccacatctgctggaaggtggacagtgaggccaggatggagccaccgatccacaccgag

SEQ ID NO: 1595 - DNA, 367 bp, Homo sapiens
  misc_feature (1)...(367): n = A,T,C or G
ccaggctaccttcccactggagacaggcagggggacaggtgctaagggacctggcaggcagggctggcaggccccatggcgcctgttccagcagatgacaagcccaggtcagggtagagcgggcaggaggggggacgagggctcccacaacatgattttgtgtaaaatatggcagcgacacacgctcagggccgggaggtgggggttagggtggggacggcggcaacatcgtgtaaaaaagtgtcccagttcccatagcaaagagagctgtgaccgggtgttcgagcttctccagtacaagggggaaagccgcccggcgggggcggcgggcagggacatcatttggtttcctggtgctgncagtccg

SEQ ID NO: 1596 - DNA, 193 bp, Homo sapiens
ctgttcttcatgcgcctggtggggaagacgcccattgagacactgatcagagacatgctgctgtcggggagtaccttcaactggccctacggctcgggccagtgaccatgacggggccacgtgtgctgtggccaggcctgcagacagacctcaagggacagggaatgctgaggccccgggaggcccctcgagg

SEQ ID NO: 1597 - DNA, 145 bp, Homo sapiens
ccatgctggatgttctgctgcttagacctgatctgctgccaattaccaggggcaggtcaaggatgaccttcttggatccaggaacgctaacatagatcagtaaggaatattcaactcgaaggatgttgcagcccaggatagaagg

SEQ ID NO: 1598 - DNA, 445 bp, Homo sapiens
ctgcctataaaactagacttctgacgctgggctccagcttcattctcacaggtcatcatcctcatccgggagagcagttgtctgagcaacctctaagtcgtgctcatactgtgctgccaaagctgggtccatgacaacttctggtggggcgagagcaggcatggcaacaaatcccaagttagggtctccaatgagcttcctagcaagccagaggaagggcttttcaaagttgtagttacttttggcagaaatgtcgtagtactgaagattcttctttcggtggaagacaatggatttcgccttcactttcctgtccttaatatccactttgttgccacacaacacaatggggatgttttcacacactcgtaccagatctctatgccagttaggcacattcttgtaagtaactctcgatgttacatcaaacattatgatggcacac

SEQ ID NO: 1599 - DNA, 142 bp, Homo sapiens
cctgccccagggggaagcacggacccgagacgacggcgatgaggaagggctcctgacacacagcgaggaagagctggaacacagccaggacacagacgcggatgatggggccttgcagtaagcagcctgacaggagcaatgg

SEQ ID NO: 1600 - DNA, 297 bp, Homo sapiens; identical to SEQ ID NO: 389

SEQ ID NO: 1601 - DNA, 289 bp, Homo sapiens
ctggagatgatcctcaacaagccagggctcaagtacaagcctgtctgcaaccaggtggaatgtcatccttacttcaaccagagaaaactgctggatttctgcaagtcaaaagacattgttctggttgcctatagtgctctgggatcccaccgagaagaaccatgggtggacccgaactccccggtgctcttggaggacccagtcctttgtgcctcggcaaaaaagcacaagcgaaccccagccctgattgccctgcgctaccagctacagcgtggggttgtggtcctgg

SEQ ID NO: 1602 - DNA, 398 bp, Homo sapiens
  misc_feature (1)...(398): n = A,T,C or G
gggagggcagagggagaatgggaagatcaggaagctctagattacttcagtgataaagagtctggaaaacaaaagtttaatgattcagaaggggatgacacagaggagacagaggattatagacagttcaggaagtcagtcctcgcagatcagggtaaaagttttgctactgcatctcaccggaatactgagaaggaaggactcaagtacaagtccaaagtttcactgaaaggcaatagagaaagtgatggatttagagaagaaaaaaattatnaacttaaagagactggatatgtagtggaaaggcctagnactacaaaagataagcncanagaagaagacaaaaattctgaaagaataacagtaangaaagaaactcagtcacctgagcaggtaaa

SEQ ID NO: 1603 - DNA, 438 bp, Homo sapiens
ctggtgatctgctttcttaccctaactcttgacaaatgagtcgtctactattttaaagagtctggaggtctctgactctgccataacaataacctgctgttaatttataacacagatttttgtttggaagagccttatttgaaatacactttgattcattttcttaaatatttatattcttttcttgcttacttcagggttggtagcttagttggaagtgccagcacctggcacctattcatatagaacaggctgtactcaagacaacttctagcatttactttaagacttatataatttatttctattttgtgtgtactatagtcttgtgcatatgtagttgaacacacagtgaaatatatgtctctctttgtggatgtgcggcctaaaaatttgaatgtctggtgagagagagccatgtgtataggtcagagaaaa

SEQ ID NO: 1604 - DNA, 297 bp, Homo sapiens; identical to SEQ ID NO: 389

SEQ ID NO: 1605 - DNA, 451 bp, Homo sapiens
ggaaaggctattgtttctcgacagtttgtggaaatgacccgaactcggattgagggcttattagcagcttttccaaagctcatgaacactggaaaacaacatacgtttgttgaaacagagagtgtaagatatgtctaccagcctatggagaaactgtatatggtactgatcactaccaaaaacagcaacattttagaagatttggagaccctaaggctcttctcaagagtgatccctgaatattgccgagccttagaagagaatgaaatatctgagcactgttttgatttgatttttgcttttgatgaaattgtcgcactgggataccgggagaatgttaacttggcacagatcagaaccttcacagaaatggattctcatgaggagaaggtgttcagagccgtcagagagactcaagaacgtgaagctaaggctgagatgcgtcgtaaag

SEQ ID NO: 1606 - DNA, 272 bp, Homo sapiens; identical to SEQ ID NO: 1006

SEQ ID NO: 1607 - DNA, 444 bp, Homo sapiens
ccaggctggtctcaaactcctcacctcaactgatccgcccaccttggcctcccaaagtgctgggattataggtgtgagccaccgtgcccaaagttaagtatttttgatcaagtgttttgtcttttgtgcaaggcatttgtggctctgtcatagcagaggaaaacaaaacatgcctatcaaatgaatcaagtccgacctcttctcatattgagcaactagaggtctaggaacatttcccctacctgtcattctcatctggcataccaggtgtacatactccttcttattctcctctgttaccaagatgttggccccattgggtttgaggtcacgaacttcacaaactccaaactcttggacctcagtgctgaaggtgaggtcatagcctagtgtggagacatcattttccagcagataaaccagaccttggtagaagtggtaatc

SEQ ID NO: 1608 - DNA, 189 bp, Homo sapiens
caaaatccaaaacttctcttgaaaagttcagggaccgtccaggggagatggggaggagatatggagtgagtcacctgctccagaagatgccagcttctctctccagggtgcttagttggctttgcccacccctcactccccagggagctctggggacagcttcctcgcacccctgtcccacccacacag

SEQ ID NO: 1609 - DNA, 426 bp, Homo sapiens
cttttgttatccttagaggactcactggtttcttttcataagcaaaaagtacctcttcttaaagtgcactttgcagacgtttcactccttttccaataagcttgagttaggagcttttaccttgtagcagagcagtattaacacctagttggttcacctggaaaacagagaggctgaccgtggggctcaccatgcggatgcgggtcacacggaatgctggagagatgttatgtaatatgctgaggtggcgacctcagtggagaaatgtaaagactgaattgaattttaagctaatgtgaaatcagagaatgttgtaataagtaaatgccttaagagtatttaaaatatgcttccacatttcaaaatataaaatgtaacatgacaagagattttgcgtttgacattgtgtctgggaaggaagggcca

SEQ ID NO: 1610 - DNA, 447 bp, Homo sapiens
cagggctatagtgcgctatgttgatctggtgttcatgctaagttccgcatcaatatggtgacttcttgggagtgggggaccaccaggttgcctaaggaggggtgaacctgcctacgttggaaatagagctggtcaaaactcctgtgctcatcagtagtagaattgcacctgtgaatagccaccgccctccagcatgggcaacatagcaagaccctgcctcttaagataaaaattggaaaacactggtaggaaaaaaaggctgtttggtctaaataagtctggattgggtataaatgacacaaaactatcatgaatttgaaagcatttctaatttcttgaaagtctgaaaaagtttaaacagaattttagctgaaaagtcctgaaagacatttgaaaaaaaacagcaagaacacttaaaactattcaaggtttgggctgggcacagtg

SEQ ID NO: 1611 - DNA, 238 bp, Homo sapiens
ccaccggggttgacctctctcgctagcagggcccacccagctcactccccgcgtcttccatcccctctaggattcccattgtcccctactccagcactaggcaggcacccccagcccactgcgactcccaccacgaaggaccccagccctctctcagccaacacggccccgcccaccgtctcagacatcgtgcttcttctggtgggccaggagtctctcctcgtcgtcgaaggtctgg

SEQ ID NO: 1612 - DNA, 293 bp, Homo sapiens
ctgctgcttgtatcctcgggagagggtttcccactctgagcgggtgggaaggcaatgccaaacatccgggaaaaataaaaccactgtctccacatgagctggaactgtacgccccttgtgggtctcctcagggcgatggtagcgaatctctgcaaaacggtaccattgtgtgcacacacttagatcaatgcctgtcagagccttacaacaacgaatagcagtcttaatcaacacagagggatctttttctgggtctggtccatccaacgaaggagaccagtggcccccaatgg

SEQ ID NO: 1613 - DNA, 224 bp, Homo sapiens
ctggattgaccccaaccaaggctgcaacctggatgccatcaaagtcttctgcaacatggagactggtgagacctgcgtgtaccccactcagcccagtgtggcccagaagaactggtacatcagcaagaaccccaaggacaagaggcatgtctggttcggcgagagcatgaccgatggattccagttcgagtatggcggccagggctccgactctgccgatgtgg

SEQ ID NO: 1614 - DNA, 439 bp, Homo sapiens
ctccaccctggcgatggctccctggtcctactttctctctcaaactggctttttctcattcctttgactccgccagacttcctcgcccccatgacctggtgttgtgtctgatcaccccaacattcctggctgcccaatgtggggcaatgaagaccccagtgaaggaatgctagagtgtgtgaaagtggaggacgcatcgtcaaaggacacctgaggacgtctcaaagaagctcggcgggagagctgagcgctcggaagaaccaagaatcatctcttttgaaaaatcgattcatcaaatgaatcttcggccaacaactgttcaagaaggattcaaatatcacaggttccaagaagtaaagctttggaggtcacaaaattagcaatagaagctgggttccgccatatagattctgctcatttatacaaataatgaggagca

SEQ ID NO: 1615 - DNA, 237 bp, Homo sapiens
aggcactcctggaagtggttcagtcaggtggcaaaaacattgaacttgctgtcatgaggcgagatcaatccctcaagattttaaatcctgaagaaattgagaagtatgttgctgaaattgaaaaagaaaaagaagaaaacgaaaagaagaaacaaaagaaagcatcatgatgaataaaatgtctttgcttgtaatttttaaattcatatcaatcatggatgagtctcgatgtgtagg

SEQ ID NO: 1616 - DNA, 266 bp, Homo sapiens
ctgggctctagtttcattccatctgtcattctcaggtaacagggacacatgtccaagtgttggcccccgtggcatgattgtagctttgttgataggcattgcatcttttgtgtaatatgcaataatggcatgaccagattcatgatatgctgtgatggttttgtttttgttatcaatttccacacttcttctttcaggccccattagaattttgtctttggaaaactccagctccttcatggtaaccatttcttttccatcaacag

SEQ ID NO: 1617 - DNA, 185 bp, Homo sapiens
  misc_feature (1)...(185): n = A,T,C or G
ccatggctaggtttatagatagttgggtggttggtgtaaatgagtgaggcaggagtccgagnaggttagttgtggcaataaaaatgattaaggatactagtataagagatcaggttcgtcctttagtgttgtgtatggttatcatttgttttgaggttagtttgattagtcattgttgggtggtg

SEQ ID NO: 1618 - DNA, 354 bp, Homo sapiens
  misc_feature (1)...(354): n = A,T,C or G
ctgttaacagataagtttaacttgcatctgcagtattgcatgttagggataagtgcttatttttaagagctgtggagttcttaaatatcaaccatggcactttctcctgaccccttccctaggggatttcaggattgagaaatttttccatcgagcctttttaaaattgtaggacttgttcctgtgggcttcagtgatggngatagtacacatntcactcagagngcatntntgcatcttntaanatanatttcttaaaagcctctaaagtgatcagntgccttgatgccaactaaggaaatttgtttagcattgaatctctgaaggctctatgaaaggaatagcatgatgtgc

SEQ ID NO: 1619 - DNA, 170 bp, Homo sapiens
  misc_feature (1)...(170): n = A,T,C or G
ctgtgctgtggagagaagctgatgttttggtgtattgtcagccatcgtcctgggactcggagactatggcctcgcctccccaccctcctcttggaattacaagccctggggtttgaagctgactttatagctgcaagtgtatctnncttttatctggtgcctcctcaaac

SEQ ID NO: 1620 - DNA, 386 bp, Homo sapiens
cctgttgattgcatactgtagaagatttgatgttcagactggttcttcttacatatactatgtttcgtctacagttggtaaatttttgtttttctttgtattaaatgttgaattgtattgtctggaggaaaagacagaggtctaaaaataaagaaggagtacagtttgggcatggtggttcacccctggagtcctagcactttgggggccaaggcaggcagattgcttgagcccaggagttctagatgagcctgggcaacatagtgagaccccatctctaaaaaaacagttttagggccaggcacagtggctcacacctgtaagcccagcactttgggaggccgaggcaggcagatcataagggcaagagattgagaccatcctgg

SEQ ID NO: 1621 - DNA, 346 bp, Homo sapiens
  misc_feature (1)...(346): n = A,T,C or G
ccaattctgcccgttccccgtgggccaacaacactggggttgtatgcgtctggaaccctgtgatagtcttcggcttgccagcctggcccaccacatccactgcctggcccacacggacagacactggcaatggccgcagctcctcatcaaacgtaaccagcattcggggctgcatggcagccaccagcccatacaatacatagtgtgatttgcctagaataatgtttcgaacatccaggaaagagacaagcacagtgagcagtccanccacggccacctggctcataagctgccggtcgctgtggtaggggcagagggtaagggtgcccttccctaaatgtgtcag

SEQ ID NO: 1622 - DNA, 366 bp, Homo sapiens
ggaagtttgtgctctctgcgtggctaagtttttcacctactaggacgggggtggggtggggagaacaggtgtccttctaaaatacagcacaagctacagcctgcgtccagccataacccaggagtaacatcagaaacaggtgagaatgaccactttaactcaccgggcccgtcgcactgaaataagcaagaactctgaaaagaagatggaaagtgaggaagacagtaattgggagaaaagtccagacaatgaagattctggagactctaaggatatccgccttactcttatggaagaagtattgcttctgggactaaaagataaagaggggtacacatctttctggaatgactgcatatcatcagg

SEQ ID NO: 1623 - DNA, 165 bp, Homo sapiens
ctgttgattggctgtgacactgctttgtgtcatcttcttaccatgatcaaaggcgaaggaagggatctcttttgggacattgtgattgttttagcagagagagaaagagatgaaatacacttcggttttctcttaaaagatgcatgtatcatacagtgctttaag

SEQ ID NO: 1624 - DNA, 227 bp, Homo sapiens
ccaatgcccggagcaggccctctttccatcccctgtcggatgagctggtcaactatgtcaacaaacggaataccacgtggcaagccgggcacaacttctacaacgtggacatgagctacttgaagaggctatgtggtaccttcctgggtgggcccaagccaccccagagagttatgtttaccgaggacctgaagctgcctgcaagcttcgatgcacgggaacaatgg

SEQ ID NO: 1625 - DNA, 373 bp, Homo sapiens
ctgtagcttttgtgggacttccactgctcaggcgtcaggctcaggtagctgctggccgcgtacttgttgttgctttgtttggagggtgtggtggtctccactcccgccttgacggggctgctatctgccttccaggccactgtcacggctcccgggtagaagtcacttatgagacacaccagtgtggccttgttggcttgaagctcctcagaggagggtgggaacagagtgaccgagggggcagccttgggctgacctaggacggtcagtttggtccctccgccgaacacccgaagataattagtgctgtctgttgagtaacaatagtagtcaccttcatcttccacctgggccccagtgatggtcaaggtgg

SEQ ID NO: 1626 - DNA, 367 bp, Homo sapiens
ccagacgtggtggctcacacctgcaatcccagcaccttaggaggccgaggcaggaggatccttgaggtcaggagttcgagaccagcctcgccaacatggtgaaaccccatttctactaaaaatacaaaaattagccaagtgtggtggcatatgcctgtaatcccaactactcagaaggccgaggcaggagaattacttgaacgcaggagaatcactgcagccctggaggcagaggttgcagtgagccgagattgcaccactgtactccagcctgggtgacagagcaagactccatctcagtaaataaataaataaataaaaagcgctgcagtagctgtggcctcaccctgaagtcagcgggcccagg

SEQ ID NO: 1627 - DNA, 424 bp, Homo sapiens
ctggataaggacatcaataccttctctatgcgtgtcagggtgtggtacgggtatcactttccggagctggtgaagatcatcaacgacaatgccacatactgccgtcttgcccagtttattggaaaccgaagggaactgaatgaggacaagctggagaagctggaggagctgacaatggatggggccaaggctaaggctattctggatgcctcacggtcctccatgggcatggacatatctgccattgacttgataaacatcgagagcttctccagtcgtgtggtgtctttatctgaataccgccagagcctacacacttacctgcgctccaagatgagccaagtagcccccagcctgtcagccctaattggggaagcggtaggtgcacgtctcatcgcacatgctggcagcctcaccaacctgg

SEQ ID NO: 1628 - DNA, 314 bp, Homo sapiens
tcgactgttatagcttagaaagcaacactactactatgagactataaaacattaaactattttaagaaaaccacgctgtggaaaaatggagccatttttgtcaaaaagtggctcaaagcacaaaactgctcagatgttcaagagtcctaggagtctgggctgcacagtattaaggggtgagaggagaccgacagcctgtttgaatcaggcttgtgagcccagctcatctgacaacttcaaagagcttctctgcctatacattccaccgtttagcataagacaccactttacgctatttacaagtctccttttgg

SEQ ID NO: 1629 - DNA, 393 bp, Homo sapiens
  misc_feature (1)...(393): n = A,T,C or G
ctggaccagcaccccattgacgggtacctctcccacaccgagctggctccactgcgtgctcccctcatccccatggagcattgcaccacccgctttttcgagacctgtgacctggacaatgacaagtacatcgccctggatgagtgggccggctgcttcggcatcaagcagaaggatatcgacaaggatcttgtgatctaaatccactccttccacagtaccggattctctctttaaccctccccttcgtgttttcccccaatgtttaaaatgtttggatggtntgttgttctgcctggagacaaaggtgctaacatagatttaagttgaataacattaacggtgctaaaaaatgaaaaattctaacccaagacatgacattcttagctgtaa

SEQ ID NO: 1630 - DNA, 317 bp, Homo sapiens
ctgcaagaatatcagaaatcaatacaaacaagtattgacaggtgttacagacatgcaaaatatccttcaatgcaacgaatttttaagaaatcagctagcctatattaatcagatgttttaggtcaaaccaagtttccatctcgggctcagtgaaatagtattaactcattgagtctcctttcccccaggaatgttgggaatggcagaacagaaagagctatcactccttaaattcttttatgcgagtgttactccaacacttattttacttggtttacttggaatgtatgagaggaaactgatgttttttacaatgg

SEQ ID NO: 1631 - DNA, 262 bp, Homo sapiens
ccttaggcaagtcaccttacttatctaagactgtttccccacctggaagatgccctacaagcctcctgtggctgtgtttagaaagcatgcccggcctttcttgacagccagccaccccagatgatggcagggcaaggaagactgttaggagtcagagtgctcccctcaggtggaaggaaactgggccaactctactttgtaagccatagggtgccaggtagcccggccaccctgagcctgtgcctccactgcccccgcgtgg

SEQ ID NO: 1632 - DNA, 138 bp, Homo sapiens
ctggaattaattcttcgacaactccagaccgaccttcggaaggaaaaacaagacaaggccgttctccaagcagaagtgcagcacctgagacaggacaacatgagactgcaggaggagtcccagaccgcgacagctcag

SEQ ID NO: 1633 - DNA, 192 bp, Homo sapiens
  misc_feature (1)...(192): n = A,T,C or G
ccttgaagggacctcanagcaaaggaagagacctgggtgtggtgaggcatcccanggcatggaagggaccggttgtgctnngggaatccactgnnccctccttggnnaaaaaagcacaacacatcatacatatttaccagaccagaagcgctggccccaagtctccccaacctggtcgggggaacctcctgg

SEQ ID NO: 1634 - DNA, 447 bp, Homo sapiens
ctgcttttaaaggtcttaaatcactcgaataccttgacttgagcttcaatcagatagccagactgccttctggtctccctgtctctcttctaactctctacttagacaacaataagatcagcaacatccctgatgagtatttcaagcgttttaatgcattgcagtatctgcgtttatctcacaacgaactggctgatagtggaatacctggaaattctttcaatgtgtcatccctggttgagctggatctgtcctataacaagcttaaaaacataccaactgtcaatgaaaaccttgaaaactattacctggaggtcaatcaacttgagaagtttgacataaagagcttctgcaagatcctggggccattatcctactccaagatcaagcatttgcgtttggatggcaatcgcatctcagaaaccagtcttccaccggatatgtatg

SEQ ID NO: 1635 - DNA, 364 bp, Homo sapiens
gttttatttgagacataaaaacacatgtgtttctattacatagtgtggggtttagggtcctggtttctaagacaagactttatttcaccctgtatcacagcttcctgggaaatgaattagggagcaagagacggcctggcaagaaaatcattattgttgctgggaagttgcaaagaaaggggagagtttattcaaattagtgtaacagagcccccaggatgaagagagtggtgcagggaaaaggtctaaattcctggtgttggtggggacactggcacatcccacagcaaggactcagccctcaacggcggcggctgggtcttgggaggggagtggtgggagggtaagggctcctcagctccct

SEQ ID NO: 1636 - DNA, 399 bp, Homo sapiens
ctggctggctagactgtttgtgcgccaagaggatggtcagcgctgctttccagcctggctctgctggggcgctggcatctggttcagttccaccattctccctgctttctttgccaagtgtgatattcacccaagggcaccagtctctatgctgagaggtgggatcaaagaagcttcgggaagatgtgtccgaactgctggaggagcagaggcgagctcgcttggctttccgcagagggctagatggtacctccaggccaggggtgtctcctgttcccatgcttcgggtcactgggcgagttctggtggtggggctagcagcctctggctcaggacggtcaacaggactggaagagtcccagctccgagttcgagagacaatgggaccagggctctttt

SEQ ID NO: 1637 - DNA, 246 bp, Homo sapiens
ctgagctttcagcagataaatcacagcagaaatagaatcaccctaggactttcaatcaaaagctggaagtccaccttacagaaagacaaaaagaaacccctttttatatcttaacaaagcaatagctctcaagcagcagagcatctcgaggaagaaagcttgcccggtcgccatcccatcatgccagagcgtgcagtgtccacccttgactacgctggggaattgctgattttttgaaaaagcttg

SEQ ID NO: 1638 - DNA, 453 bp, Homo sapiens
ccaagagttctccactgtgaagactgaaaggacctggtgacatttcggcatcagtcctgttaccacttggaggtaacagaagcaggctcgtgtcctcctttaattctaccacactacatgactcgcaattggttctgaaattagaacgttcaccatcgtacttaaaatcttaggggcatgaagagtcagctagaacaaggaaaaagaaagtcgcaggtagtaggtaagtaggtgggcacatgaaaagccaagctgctctgtccaacaccagtgtacatgtgctttaactaaatgaactccagaggccaacagcagcagacctgctcaattcaccttccaaatcagaacaagaccaaaaagctcaggcttgagttgtcaactatgcataggttccgccagtgatgaggagctcgtaagcaggatctctactccttctgcacaacacgatgcaag

SEQ ID NO: 1639 - DNA, 197 bp, Homo sapiens
tttgctgttcgtgatatgagacagacagttgcggtgggtgtcatcaaagcagtggacaagaaggctgctggagctggcaaggtcaccaagtctgcccagaaagctcagaaggctaaatgaatattatccctaatacctgccaccccactcttaatcagtggtggaagaacggtctcagaactgtttgtttcaattgg

SEQ ID NO: 1640 - DNA, 278 bp, Homo sapiens
ccagagcggtgagtcccaccacctcgaactctgggaattcgagccacagctctgccagtaccccaagactcagcactagtctgatgacctgctaattcactgacagcatagggctgtctgttgtttttgcgcaagttggtgtgaacaaagttcacaatatctggtcgaataggagccttgaatacagcaggcaaagtgacatttttgccagatgactcccccttttcggagtacaccgatatcagtgggcgagcgcacgccatggcggacctcggccg

SEQ ID NO: 1641 - DNA, 227 bp, Homo sapiens
ccattgttcccgtgcatcgaagcttgcaggcagcttcaggtcctcggtaaacataactctctggggtggcttgggcccacccaggaaggtaccacatagcctcttcaagtagctcatgtccacgttgtagaagttgtgcccggcttgccacgtggtattccgtttgttgacatagttgaccagctcatccgacaggggatggaaagagggcctgctccgggcattgg

SEQ ID NO: 1642 - DNA, 299 bp, Homo sapiens
ctgcacatcaaggacatcttcaggaagttcaggattgccgtagctaaactgaaaaccaccatccatggactctccaaaccaaacgtgtttcttctcagcactagaatctgtccaccagtgtttccgtggaacattcaaaggattggcacttatgcatgtttccccagtttccatattacagaataccttgatagcatccaatttgcatccttggttagggtcaacccagtattctccactcttgagttcaggatggcagaatttcaggtctctgcagtttctagcggggtttttacgag

SEQ ID NO: 1643 - DNA, 301 bp, Homo sapiens
ccaagggctacaatgagcagcgcatcagacagaacgtgcaggtttttgagttccagttgactgcagaggacatgaaagccatagatggcctagacagaaatctccactattttaacagtgatagttttgctagccaccctaattatccatattcagatgaatattaacatggagagctttgcctgatgtctaccagaagccctgtgtgtggatggtgacgcagaggacgtctctatgccggtgactggacatatcacctctacttaaatccgtcctgtttagcgacttcagtcaactacag

SEQ ID NO: 1644 - DNA, 365 bp, Homo sapiens
ctggtgagcgaaggatgggagcagagaacagagctaaaacccctggttttcctttccccagatgtaaagcctgctagctggaactcacagaagattggaacaaaaagataggagatggacacctgggggactgctccagcacgaagggaagcgatgagcatcacacagcagggccattgcaggggacaggtgctgtaattcctgcccagagaacttgaaagcttacagtgtgctcacaggaaggaatcggctcagctagtccagaaattgctgcatttcccatattacttagttctttattcatcctgtggtaaagagtcacccttgttttccgtatctataaaactgaaagacttaaaatttac

SEQ ID NO: 1645 - DNA, 249 bp, Homo sapiens
ctggtgctggaactgcagaaagttaagcaggagaacatccagctagcggcagacgcccggtctgctcgtgcctatcgagacgagctggattccctgcgggagaaggcgaaccgcgtggagaggctggagctggagctgacccgctgcaaggagaagctgcacgacgtggacttctacaaggcccgcatggaggagctgagagaagataatatcattttaattgaaaccaaggccatgctggaggaacag

SEQ ID NO: 1646 - DNA, 433 bp, Homo sapiens
  misc_feature (1)...(433): n = A,T,C or G
ctgtggccggattgatggggcccccacttcctagggctgaaggcaagttgaaggaagcagcaggagtaccggaatgaaaaccttgtttctcaaaggactgctgggttttggagtacacagaacccgagatatctggcacgcccgtgttactggaggtgactgaaacaccagtgttgtatccatgagacccatatccactcggctgttggaaaggggtggccgatgcattcacactgacattcacaccatgctgcttggaagaggtaggagccacagggaacacagcaggcccatactggaaggtgctggggaggcccgggacccctgtatagtatggcaggctggtgtaaactgtagccaggaggcagcgccgggttcaggaatgtctgctgcgtggnatggtgagtctgcgtctggtttctgttggggttgg

SEQ ID NO: 1647 - DNA, 451 bp, Homo sapiens
ccagcttgcaagcacgctggcaaatctctgtcaggtcagctccagagaagccattagtcattttagccaggaactccaagtccacatccttggcaactggggacttgcgcaggttagccttgaggatggcaacacgggacttctcatcaggaagtgggatgtagatgagctgatcaagacggccaggtctgaggatggcaggatcaatgatgtcaggccggttggtagcgccaatgatgaacacatttttttttgtggacatgccatccatttctgtcaggatctggttgatgactcggtcagcagccccaccaccatctccaatgttacctccacgagccttggcaatcgaatccagctcatcaaagaatagcacacagggggcagcttggcgggccttgtcaaagatttctctgacattggcctcagactccccaaaccacatggtgag

SEQ ID NO: 1648 - DNA, 176 bp, Homo sapiens
cctaaacgaggatttcagcttccattatgcccaactccagtccaacatcattgaggcgattaatgagctgctagtggagctggaagggacaatggagaacattgcagcccaggctctggagcacattcactccaatgaggtgatcatgaccattggcttctcccgaacagtagagg

SEQ ID NO: 1649 - DNA, 435 bp, Homo sapiens
tgtggctgtgccgttggtcctgtgcggtcacttagccaagatgcctgaggaaacccagacccaagaccaaccgatggaggaggaggaggttgagacgttcgcctttcaggcagaaattgcccagttgatgtcattgatcatcaatactttctactcgaacaaagagatctttctgagagagctcatttcaaattcatcagatgcattggacaaaatccggtatgaaagcttgacagaccccagtaaattagactctgggaaagagctgcatattaaccttataccgaacaaacaagatcgaactctcactattgtggatactggaattggaatgaccaaggctgacttgatcaataaccttggtactatcgccaagtctgggaccaaagcgttcatggaagctttgcaggctggtgcagatatctctatgattgg

SEQ ID NO: 1650 - DNA, 246 bp, Homo sapiens
ccatgtctgtattgtaactggtaaaaggcttcaagtcagattgatgatcaagaaaagtcaaaaccccagcccaagattgggaaagcaggtggtggttccaagcttttaaaaaattattgaagctctccatcctgttctgtgagtgtgtcttctctttctccttcacgtcatagccgtgacccaccgttcatctctgctcttgcgtaaagatgaccgatggagtccaaagccaagtggcttcaccag

SEQ ID NO: 1651 - DNA, 400 bp, Homo sapiens
  misc_feature (1)...(400): n = A,T,C or G
cggcaagttctcccaggagaaagccatgttcagttcgagcgccaagaccgtgaagcccaatggcgagaagccggacgagttcgagtccggcatctcccaggctcttctggagctggagatgaactcggacctcaaggctcagctcagggagctgaatattacggcagctanngaaattgaagttggtggtggtcggaaagctatcataatctttgttcccgttcctcaactgaaatctttccagaaaatccaagtccggctagtacgcgaattggagaaaaagttcagtgggaagcatgtcgnctttatcggctcagaggaggaattctgcctaagccaactcnaaaaagccgnacnaaaaattanngcaaaaagcgtnccaggagccgtnctctgacag

SEQ ID NO: 1652 - DNA, 338 bp, Homo sapiens
ctgggggtgcccatcttctgtgctctgtggtacatatctgtgtcgccaaagtagcgtgcccggtacagcaagccttccttctgctgcttctccttccagcagttgttccggaggttggcgatataatcatcttccacattccgctcgactgttttgaggctggagcctgtgtactcttcggagaaagtgtctcccacatagtagacgacacccaggtggtcagtgactcgcctgtggatgtggcccacagacggtcttggactcagactgtagggtggactggagaccatgagctggctgagagctgacacgagaatcaggatgaggataggcatcag

SEQ ID NO: 1653 - DNA, 167 bp, Homo sapiens
gcggtggagccgccaccaaaatgcagattttcgtggaaacccttacggggaagaccatcaccctcgaggttgaaccctcggatacgatagaaaatgtaaaggccaagatccaggataaggaaggaattcctcctgatcggcagagactgatctttgctggcaagcag

SEQ ID NO: 1654 - DNA, 1034 bp, Homo sapiens
  misc_feature (1)...(1034): n = A,T,C or G
atgcatgctcgagcggccgccagtgtgatggatatctgcagaattcgcccttagcgtggtcgcggccgaggtccaagagggagataanacaaacttctcaaacaaaaagaaaagaaaaacgaatgattcatctgctttaatcagtgtgattaatgcagcacccattgccccgggaaccgtttctgctgtactatctggatactaaaatgttacggaagtagctctttgttctccctcactctgcccttagttaatagaaattcagactcgccaagtaaggctttgtgcatagtgtcttcatgtcgcgtatagttgagcgcgttcttagcagttggcttcatggacagctcattagtgttttgacttttcttacccagcgttaattgaattcttgcttttagacaacttcctttttgtagtggtgaaccttgccctttagtacagttcaagtgaatctggataattgttcatctttgctttagcttagataccatgtagtggtctgtggctacaggaagctggttctgtctgcttccacagtctgcttaaaaaactgtctgacttcgtgaatatagagaccaagtttaccacttctgatgaagagaccaattaagattcattcctcattctgtttctttccagtgggagaagagtccccatgaaataagatgaaactgattccatgcactagtacatgtaggcttctcccttgcgcaaagcttaacaatttgtaggaaactttgggtctttttgtcccaagaaaaaggaatgtcttgacaggcttaaagcttttcgtccccttgcaccttaaaactcgaaagttaggnaaaatccctttaaagggctttttttaatagccagaacttcccaaaaggaatggcnttttagggaatttcntagccatngctttttaaatttaaagaaatttttaanaaccttgccccnggggnggggncccgctccaaaaaggggnggnaaaattccccagccnaccctttnggggggggccncgttttcctttnnnggggggaanc

SEQ ID NO: 1655 - DNA, 487 bp, Homo sapiens
atgcatgctcgagcggccgccagtgtgatggatatctgcagaattcgccctttcgagcggccgcccgggcaggtcctactcttctccgtccattgtactatctgcccgtggtggggatggcagtaggatcatatttgatgacttccgagaagcatattattggctccgtcataatactccagaggatgcgaaggtcatgtcctggtgggattatggctatcagattacagctatggcaaaccgaacaattttagtggacaataacacatggaataatacccatatttctcgagtagggcaggcaatggcgtccacagaggaaaaagcctatgagatcatgagggagctcgatgtcagctatgtgctggtcatttttggaggacctcggccgcgaccacgctaagggcgaattccagcacactggcggccgttactagtggatccgagctcggtaccaagcttggcgtaatcatggtcatagctgttt

SEQ ID NO: 1656 - DNA, 514 bp, Homo sapiens
  misc_feature (1)...(514): n = A,T,C or G
atgcatgctcgagcggcccgccagtgtgatggatatctgcagaattcgcccttancgtggtcgcggccgaggtcctacccataatccagagaggcttgcccagaggaggactacgtgggggacgtgccaccagaaccctacttgggggcgggatgtcactccgaggtcaaaacctgctccgaggtggacgagccgtagctccccgaatgggcttaagaagaggtggtgttcgaggtcgtggaggtcctgggagagggggcctagggcgtggagctatgggtcgtggcggaatcggtggtagaggtcggggtatgataggtcggggaagagggggctttggaggccgaggccgaggccgtggacgagggagaggtgcccttgctcgccctgtattgaccaaggagcagacctgcccgggcggccgctcgaagggcgaattccagcacactggcggccgttactagtggatccgagctcggtaccaagcttggcgtaatcatggtcatagctgttt

SEQ ID NO: 1657 - DNA, 605 bp, Homo sapiens
  misc_feature (1)...(605): n = A,T,C or G
atgcatgctcgagcggccgccagtgtgatggatatctgcagaattcgccctttcgagcggccgcccgggcaggtccanacgctgacattgnttctgagtccttaagcaggaaggatttgaaatcctggagcttggcagtcttgctcttcacctctaagccaatgttgaccccttcatctataaagtccacaactctccggaagtcatcctcacggaactgtcgagaagttaaggctggggccccaagccgcaggccgcccggtgtgatggcacttcggtctccaggacaggtgttcttgttggcagtgatggatacaagctctagcacccgctcagcccgagctccatccaggcccttgggccgcaggtccaccagcaccaggtggttgtcagtaccacctgataccagtgagtagcctcgccctagcagggcatctgccatggcccgagcattcttcagaacctgcagggagtactcccggaacatgggggtgcaggacctcggccgcgaccacgctaagggcgaattccagcacactggcggccgttactagtggatccgagctcggtaccaagcttggcgtaatcatggtcatagctgtttc

SEQ ID NO: 1658 - DNA, 784 bp, Homo sapiens
  misc_feature (1)...(784): n = A,T,C or G
agnnttccgncggccctcnagntgcatgctcgagcggccgcgcagtgagatgnatatctgcagaattcgcccttancgtgggcgnangcatgacgctcgggatcagaactaaaacaagtgagatcacccctctaattatttctgaactnggttaataaaagcttataagatttttatgaagcanccactgtatgatattttaagcaaatatgttatttaaaatattgatccttcccttggaccaccttcatgttagttgggtattataaataagagatacaaccatgaatatattatgtttatacaaaatcaatctgaacacaattcataaagatttctcttttataccttcctcactggccccctccacctgcccatagtcaccaaattctgttttaaatcaatgacctaagatcaacaatgaagtattttataaatgtatttatgctgctagactgtgggtcaaatgtttccattttcaaattatttagaattcttatgagtttaaaatttgtaaatttctaaatccaatcatgtaaaatgaaactgttgctccattggagtagtctcccacctaaatatcaagatggctatatgctaaaaagagaaaatatggtcaagtctaaaatggctaattgtcctatgatgctattatcatagactaaccgacatttatcttcaaaacaccaaattgtctttagaaaaaattaatngtgattaccaggtagaaggacctgcccgggcggnccgctcgaaagggccgaaattccagccccacctgggc

SEQ ID NO: 1659 - DNA, 789 bp, Homo sapiens
  misc_feature (1)...(789): n = A,T,C or G
tngngccctctagatgcangctcgagcggccgccagtgtgatggatatctgcagaattcgcccttagcgtggtcgcggccgaggtccattaaagataagtttggctaactattttactgaagagactaatggtcttccctctgttgtactgctatgtttcttgatctgtttttccccaatgtaacagtctacattgaagtcctttagctctctccatatactaattgacatttgttaaggattcaatattttgtgaattctttttacccttaaaatgcatatctttcagagagataagaatgaattttgcaataatttatatgcagagtgtgcttatgggtttctgggagttcaagttagtaccccagagtgcttaaaagtacgatgctaaattctaaggctaatgtaatgactgtagattatctatgtccacattgttcaacagaaatataatgtgaaccacaacataatttttaattttctagtagccatattaaaaaagaaacaagcaaaattaattttaataacagtttatgtaacccagtatattaaaaatatcatttcaacatgtaatcaatataaaagattattaatgaaacaccttatcctctttttcttccatgctaagtcttagatttgagtgtattttgcactcacagcacatctcaattctgactggacctgcccgggcggccgctcgaaagggcgaattccagcacactgggcggccgttactagtggatccgagctccggtaccaagcttggcgtaatcatggtcatagctgttt

SEQ ID NO: 1660 - DNA, 559 bp, Homo sapiens
  misc_feature (1)...(559): n = A,T,C or G
ccncgccctctagatgcatgctcgagcggccgccagtgtgatggatatctgcngaattcgccctttccagcggccgcccgggcaggtccatcagacttcttgggtgcctggctatattcaatgtgaagtaaaaaatatcccaagtcttacaccaaaatagaggctctgacttagaagtatgcttttagctttctttttaaataagacattctggaagaaaaaaaaagaaaaaggaaagaaaatcaagtttgaaacacagttaacacttattttggcaagaaagcaaccaaaatctaaaaagcataaactatgngtccaaatgnaaaaggnattacagaacaaactgcaagaggggaaaattaaagccncactgaacgaaaaaatacagtatgtctaacattttggaattgnaatttaaaccctaagggcaaaagctgaaaaatcatgcttanacctnggncgngaccacnctaagggcgaattccancacactggcggncgttactagtggatccnanctcggtaccaagcttggcgtaatcctnggcatagctgtttc

SEQ ID NO: 1661 - DNA, 453 bp, Homo sapiens
ttgggccctctagatgcatgctcgagcggccgccagtgtgatggatatctgcagaattcgccctttcgagcggccgcccgggcaggtctgcagtgtccctttttatatcatgctagtgttgagacatacttgactaacttgggaacagttcgatatattgacaaccgtcaacttaagaaaatcaacagcttttggccccagcgtccaagtgaacttttcatggagtgcagaatctcaaatggacaaaatactttgtctttttaaatactgaaaatttaattattagtactatgactgaaagattcttcatggctaaaaagctctgcatcaaactcaattcaggaggacctcggccgcgaccacgctaagggcgaattccagcacactggcggccgttactagtggatccgagctcggtaccaagcttggcgtaatcatggtcatagctgtttc

SEQ ID NO: 1662 - DNA, 809 bp, Homo sapiens
  misc_feature (1)...(809): n = A,T,C or G
ctcgagcggccgccantgtgatggntatctgcagaattcgcccttancggccgcccgggcaggtccttagccaaagaatgcagtggagccttcccccnggggctgcattgtgaatgaataccaattgacagcataaaaattaatagtcccatatcagatctggaaggggtttctggggctgtctgatgtccctatcctgttgtagtgaacacaatagcagaaaattctttctgggtccatctgctataaagtcttggtaaaacagcattactatgaagaggatgaactcacctaccttcanatggaggaaaagtgaaaaggacttaggctttagtcctccatgacttttcttaagcactacctacctgtaataagctgagtgcaaaaggatgccgaagaaaatctgcacccagaagctgttagaaagcactgcagangaacagggnatgaataaaataaanagntcttaataaacccttaagattctttgntcaaggggnactttgccaaaaggggcagaatangngggnaaagagttgcttttaatctagctctacactggcntttgaaaataaaatttgcccatttngaaatatatngggntataattaaaatgnggctttttacactggnggggctatataaaaactgggtagnnaaatttccaccgagcatntatggngatttgntcacagnaaacctccgggcnggacccacgctaagggnggaattccagcnacantgggggggncngntacctanagtggatcccnagnctnggggnccccnaanctttgggggngtnaatc

SEQ ID NO: 1663 - DNA, 585 bp, Homo sapiens
ttgggccctctagatgcatgctcgagcggccgccagtgtgatggatatctgcagaattcgcccttgccgcccgggcaggtgatggatgaggagcaaaaactttatacggatgatgaagatgatatctacaaggctaataacattgcctatgaagatgtggtcgggggagaagactggaacccagtagaggagaaaatagagagtcaaacccaggaagaggtgagagacagcaaagagaatatagaaaaaaatgaacaaatcaacgatgagatgaaacgctcagggcagcttggcatccaggaagaagatcttcggaaagagagtaaagaccaactctcagatgatgtctccaaagtaattgcctatttgaaaaggttagtaaatgctgcaggaagtgggaggttacagaatgggcaaaatggggaaagggccaccaggctttttgagaaacctcttgattctcagtctatttatcagacctcggccgcgaccacgctaagggcgaattccagcacactggcggccgttactagtggatccgagctcggtaccaagcttggcgtaatcatggtcatagctgtttcc

SEQ ID NO: 1664 - DNA, 999 bp, Homo sapiens
  misc_feature (1)...(999): n = A,T,C or G
anccngctcnagcggccgccantgtgatggatatctgcagaattcgccctttcgagcgggccgcccgggcaggtctgacaatngattaaacaggcgacatgcaacccccactaaggttaaaagtccaaaactactcacacgcatctcttnattggggaaaagctgagactattatncattcttggtagncttgcaaccttgcatgaagagcacccattgcatttctttcatctttcagaaagcaccggtatctgttccaagggnctaacagtacnaaaatacnttntgggattacacctttnaaacccaanactgttntcattaaaaataattttggnttgtaacaaaattatgaaatacaatgcaagcacctnggtatagcattattactgaaaccacttaattcccagctttttgagttttttaaaaaaacccactgcactaagattcacaattcattgctacatacaaattaaagctagtaagaacacactaacgtcacaagtttctcattctaaagtgcnaaanccntaatngtctngaaagtggaacaggggtaaagggcaaaaattaaccccccccaccccaattaaagtttcctggaangtcantantnttttnaatccccaaaggnnncatttctntttaaaaaaattggntacctttggaactggggtaaagnaaaatnaggaacccctgggnggttttttttatnttttcttnaanccaaccccccaattccaccttaaaaacccccacccggggganggccaaaangnccacccttgnggaaacncttttngtgggggncccggtcgnaaaacccaaccnccctntaaaaagggggggtcgnnaaaaaatttctcccnaaganaaacccacctttggggcgnggggacncgntttacccnttaaaatggggggaattccccgaaagcgtttgggggtaaccccaaaagacctttggggggggaaaaatgaatgggggnccattaaccn

SEQ ID NO: 1665 - DNA, 27 bp, Artificial Sequence
  PCR primer
gctaaaggtgaccccaagaaaccaaag

SEQ ID NO: 1666 - DNA, 37 bp, Artificial Sequence
  PCR primer
ctattaactcgagggagacagataaacagtttcttta

SEQ ID NO: 1667 - protein, 207 aa, Homo sapiens
MQHHHHHHAKGDPKKPKGKMSAYAFFVQTCREEHKKKNPEVPVNFAEFSKKCSERWKTMSGKEKSKFDEMAKADKVRYDREMKDYGPAKGGKKKKDPNAPKRPPSGFFLFCSEFRPKIKSTNPGISIGDVAKKLGEMWNNLNDSEKQPYITKAAKLKEKYEKDVADYKSKGKFDGAKGPAKVARKKVEEEDEEEEEEEEEEEEEEDE

SEQ ID NO: 1668 - DNA, 636 bp, Homo sapiens
catatgcagcatcaccaccatcaccacgctaaaggtgaccccaagaaaccaaagggcaagatgtccgcttatgccttctttgtgcagacatgcagagaagaacataagaagaaaaacccagaggtccctgtcaattttgcggaattttccaagaagtgctctgagaggtggaagacgatgtccgggaaagagaaatctaaatttgatgaaatggcaaaggcagataaagtgcgctatgatcgggaaatgaaggattatggaccagctaagggaggcaagaagaagaaggatcctaatgctcccaaaaggccaccgtctggattcttcctgttctgttcagaattccgccccaagatcaaatccacaaaccccggcatctctattggagacgtggcaaaaaagctgggtgagatgtggaataatttaaatgacagtgaaaagcagccttacatcactaaggcggcaaagctgaaggagaagtatgagaaggatgttgctgactataagtcgaaaggaaagtttgatggtgcaaagggtccagctaaagttgcccggaaaaaggtggaagaggaagatgaagaagaggaggaggaagaagaggaggaggaggaggaggaggatgaataatgactcgag

SEQ ID NO: 1669 - DNA, 2821 bp, Homo sapiens
ccacgcgtccgcgccgcgcggcgcaggggaggcgagaggcgccccccggtggagagcctgagccccgcgcaagtctggcggcacctggcgagcggagccggagtcgggctggggaccgcggggttgaggccggaccgcggcggggtcgggggagaaacgcgcgctgccctggcacgggccccaaccccccggccgcgcggaatggtatggcccggccggagttaaggccggggggaggcggcgagtcccgcggcggcggcgacgatggggctgcgtgcaggaggaacgctgggcagggccggcgcgggtcggggggcgcccgaggggcccgggccgagcggcggcgcgcagggcggcagcatccactcgggccgcatcgccgcggtgcacaacgtgccgctgagcgtgctcatccggccgctgccgtccgtgttggaccccgccaaggtgcagagcctcgtggacacgatccgggaggacccagacagcgtgccccccatcgatgtcctctggatcaaaggggcccagggaggtgactacttctactcctttgggggctgccaccgctacgcggcctaccagcaactgcagcgagagaccatccccgccaagcttgtccagtccactctctcagacctaagggtgtacctgggagcatccacaccagacttgcagtagcagcctccttggcacctgctgccaccttcaagagcccagaagacacacctggcctccagcaggctgggccatgcagaagggatagcaggggtgcattctctttgcacctggcgagagggtctgactctgggcacccctctcaccggctacaaggccttggactcactgtacagtgtgggagccccagttcccacctctgtgacaataggatcatggccttacccttgaagcattaccgagaaggagaacagagatgggcttgaagagccacgtgctgccggctccaaattcccaaggacaaggatccctctgcatttttgtctatgtaacctcttatatggactacattcagctgcaaggaaaggaaaaccttgattgcagtggtttaaacaaacagaagattgtttttccacatagcatggattctggagatgggtggctaatggtattggttcaacaactccacgaaggtaggggtcacgtcttggatccttttgccttaatctcagtgctcgttacttcatggtcccaagatggctgctgtatccccaagaatcatgtctgcgttcaaggaaggaggggtggaggaagaggaagggccaaactagctggacccgtcaccttctatcagaaagtaaaacctcgtcagaagtctgtttcctgctctctccctctgcatatcttcacttagatgcccttggcccgagccagctaccattgcacctctagctgcaaacaaagctaagacagcagggaacagaattgtcatggctgaatagaccaatcgtgttccatctactgagactggcacactgcctcctgcaataaaactgggatcccattaccaagagagaaatgcagaattgtgtaccagttagcttttgctgtgtaacaaaccatccccaaacttggcagctagaaacaaaccctgtattttcccacaatcctatgggttggcaatttgggctgggctcaacagggcagttctgctgctcacacctgggatccctcatggagctaaggtcagctgttacctcagctgggcctggatggtctaggatagccttactcacttgcctggcaggtgacaggctgttggctggaattgcttggttctcctccatgtggcctctccagcaggctagctcaggcttattcacatgatggcttcaggattccaaagagagtgagagtagaagctgaaagacttcttgagttcttggcctggaactgggactaggacagtgtcacttctgctaagttcttttggtcagagcaaatcacaaggctttacccagattcaagggatgagaaacagactacatgtcttgatgaggggaaccacaaagagcttgtggccatttttcacctatcacaaataattttggatgggtatttatttggataaaggtatttccctcttccccctttctctctgtctcatggggcctcactctgccaagttggaaggcactaagacattgtcctggccctcagggtctaggggaagaggtgttggggcaggaagtgagtctctccatgggctggacccactgtagtaggagtgcctccttgtctgcactgctggtatggggttaggccaggtaggacattccagaggggcttctgaaaaccaagagtccctggggaaagggaacagagtaaggcaggccttgttctcactgccctctaagggaacttggtcactcggcacttttaagcctcagtttctccagttcaataataaggacaagagcttttcccatgcattctctttccccgggaaagttgactgaggtgaccagtaatagaattgaaaagggagagtgtcttcagtgcaatgtggcatcctggattgggtcttggaacaaaaacaggacattagtgggaaaattggaaatctgaaaaaagtctgaattttagttaatataccaatttcagtctcttggttttgacagatgtaccatggtgatgtaagatgttgaccttggggtaggctgggtgaagggtatacaggaactctttgtactatctctgcaacttctctgtaaatctagtatcattccaaaataaaagtttatttaatttaaaaaaaaaaaaaaaaaaaaaaaaaaaaaaaaaaaaaaaaaaaaaaaaaaaaaaa

SEQ ID NO: 1670 - protein, 137 aa, Homo sapiens
MGLRAGGTLGRAGAGRGAPEGPGPSGGAQGGSIHSGRIAAVHNVPLSVLIRPLPSVLDPAKVQSLVDTIREDPDSVPPIDVLWIKGAQGGDYFYSFGGCHRYAAYQQLQRETIPAKLVQSTLSDLRVYLGASTPDLQ

SEQ ID NO: 1671 - protein, 109 aa, Homo sapiens [sequence omitted]

SEQ ID NO: 1672 - protein, 145 aa, Homo sapiens
MGLKSHVLPAPNSQGQGSLCIFVYVTSYMDYIQLQGKENLDCSGLNKQKIVFPHSMDSGDGWLMVLVQQLHEGRGHVLDPFALISVLVTSWSQDGCCIPKNHVCVQGRRGGGRGRAKLAGPVTFYQKVKPRQKSVSCSLPLHIFT

SEQ ID NO: 1673 - protein, 117 aa, Homo sapiens
MDYIQLQGKENLDCSGLNKQKIVFPHSMDSGDGWLMVLVQQLHEGRGHVLDPFALISVLVTSWSQDGCCIPKNHVCVQGRRGGGRGRAKLAGPVTFYQKVKPRQKSVSCSLPLHIFT

SEQ ID NO: 1674 - protein, 90 aa, Homo sapiens
MDSGDGWLMVLVQQLHEGRGHVLDPFALISVLVTSWSQDGCCIPKNHVCVQGRRGGGRGRAKLAGPVTFYQKVKPRQKSVSCSLPLHIFT

SEQ ID NO: 1675 - protein, 102 aa, Homo sapiens
MQNCVPVSFCCVTNHPQTWQLETNPVFSHNPMGWQFGLGSTGQFCCSHLGSLMELRSAVTSAGPGWSRIALLTCLAGDRLLAGIAWFSSMWPLQQASSGLFT

SEQ ID NO: 1676 - DNA, 1336 bp, Homo sapiens
ctctaagcagcatgtaacctggcctgcatccaggaaatagaggacttcggatccttctaaccctaccacccaactggccccagtacattcattctctcaggaaaaaaaacaaggtccccacagcaaagaaaaggaataggatcaagagatacgtggctgctggcagagcaagcatgaattcgatgacttcagcagttccggtggccaattctgtgttggtggtggcaccccacaatggttatcctgtgaccccaggaattatgtctcacgtgcccctgtatccaaacagccagccgcaagtccacctagttcctgggaacccacctagtttggtgtcgaatgtgaatgggcagcctgtgcagaaagctctgaaagaaggcaaaaccttgggggccatccagatcatcattggcctggctcacatcggcctcggctccatcatggcgacggttctcgtaggggaatacctgtctatttcattctacggaggctttcccttctggggaggcttgtggtttatcatttcaggatctctctccgtggcagcagaaaatcagccatattcttattgcctgctgtctggcagtttgggcttgaacatcgtcagtgcaatctgctctgcagttggagtcatactcttcatcacagatctaagtattccccacccatatgcctaccccgactattatccttacgcctggggtgtgaaccctggaatggcgatttctggcgtgctgctggtcttctgcctcctggagtttggcatcgcatgcgcatcttcccactttggctgccagttggtctgctgtcaatcaagcaatgtgagtgtcatctatccaaacatctatgcagcaaacccagtgatcaccccagaaccggtgacctcaccaccaagttattccagtgagatccaagcaaataagtaaggctacagattctggaagcatctttcactgggaccaaaagaagtcctcctccctttctgggcttccataacccaggtcgttcctgttctgacagctgaggaaacgtctctcccactgtttgtactctcaccttcattcttcaattcagtctaggaaaccatgctgtttctctatcaagaagaagacagagattttaaacagatgttaaccaagagggactccctagggcacatgcatcagcacatatgtgggcatccagcctctggggccttggcacacacacattcgtgtgctctgctgcatgtgagcttgtgggttagaggaacaaatatctagacattcaatcttcactctttcaattgtgcattcatttaataaatagatactgagcattcaatgtgaaaaaaaaa

SEQ ID NO: 1677 - protein, 250 aa, Homo sapiens
MNSMTSAVPVANSVLVVAPHNGYPVTPGIMSHVPLYPNSQPQVHLVPGNPPSLVSNVNGQPVQKALKEGKTLGAIQIIIGLAHIGLGSIMATVLVGEYLSISFYGGFPFWGGLWFIISGSLSVAAENQPYSYCLLSGSLGLNIVSAICSAVGVILFITDLSIPHPYAYPDYYPYAWGVNPGMAISGVLLVFCLLEFGIACASSHFGCQLVCCQSSNVSVIYPNIYAANPVITPEPVTSPPSYSSEIQANK

SEQ ID NO: 1678 - protein, 177 aa, Homo sapiens
TRPRRAAQGRREAPPGGEPEPRASLAAPGERSRSRAGDRGVEAGPRRGRGRNARCPGTGPNPPAARNGMARPELRPGGGGESRGGGDDGAACRRNAGQGRRGSGGARGARAERRRAGRQHPLGPHRRGAQRAAERAHPAAAVRVGPRQGAEPRGHDPGGPRQRAPHRCPLDQRGPGR

SEQ ID NO: 1679 - protein, 42 aa, Homo sapiens
LVCCQSSNVSVIYPNIYAANPVITPEPVTSPPSYSSEIQANK

SEQ ID NO: 1680 - DNA, 717 bp, Homo sapiens
  misc_feature (1)...(717): n = A,T,C or G
aaaagaatttttgctttctttntctctaaattttccttccgtgctttgatgcgggctcgtttctcacgttccagtctgggaaaatggtccacataaggcaaggcaaagaatcgtttcctattgtatcttttatttaggtgccaaggtataacccactgcttgaacttgtgccagatgattcttccaaagatgtctcttctccaagcaccaggtctagctctttcttgaccagtctgaagaagccttagggcatcttctctttcctggacaactttatctaatgcatccatggaatctactaccttatctaaccgctctggacttggcattggcaatctctgccgcttggcctcctgctctagggttagaagcatgtttctttctttcagtaagacataccaaagtttgtgtaaatcttcattacttttgttccttagttgctgacaggtccatgctgctccagattttactttttcttgcccccagttttttgggtcatcaaaaaattcttctagtcctttccttgacaatgtggtatgaagtaatctatattggtgaaaggatgtcacatttggtgtactcttangcaacaaactaagaaaaaaccctgtcaggcagggacctgaggagttattaacgaaccgggaagaattcagggcggatgaaactctcctaccaagaaagggncaaaccgggccgcagccatgttttccncat

SEQ ID NO: 1681 - DNA, 305 bp, Homo sapiens
ctgtacatttaacaaaatatgtgcaagactgtcatggtgaaaactacaaaacaatgataaaagaaattcaagaaaacaaataaatacaggggtatactatattcatgaattgggagaatcaatatcattattaagtctcctcagattgatctatagattcacagaaatcccaattcaaaccctatcaggactatttgtagaaatagacacactgatgataaaatttacatagaaacacaaaggaagcagaatagccaaaaattattggggaaaaaatgtagttgaaggattcccattactccttt

SEQ ID NO: 1682 - DNA, 498 bp, Homo sapiens
aaattacactccataaatttagacatatgtctctccaagtaagtacgagctgattgggaacgggctccaatggacatggctctgcagtcaaaatagttagcagatggacaggtttggaaaatgtgagggcccatatcatcataaccagcaataaggagaccaacaccatatggtctccggccatatcgttgtgttggtatctgggtctcttagactggttaacgagcttgttttaacaaggaatgaagtactgtctttattttcaaattatacattattaacaaaggtctctggcttattctttaattgttgcataatccaccagagaaataatgcaataggacactatttctttggcctaatataaaatgtttgactttctaccgaacctaagaaagagtgccagcaaaataatttcttcccatctaaaacctgatttgttttggatacaagggggtctaggatttcttgggacatctagaaccattaagaaacttt

SEQ ID NO: 1683 - DNA, 322 bp, Homo sapiens
aaaaattaaaaatagcacaattctacaattctgattttaccaagaaaataaaccttttttggcacatattatcctatgaaaatggaaagctgagtcaggctgctctgcttttcacagcacaaataagcattcatgctatcagacttgggaaattaactcggtgacaaaaattcactggaaaatagaatccttggaaaaatggggtcaggtgccatccactgagaggcaatgataatgtgtgtccttcgttattagcacaaagttaggcagcacactataattttagctacatgcaactctataggaacacatgtgggtaagg

SEQ ID NO: 1684 - DNA, 293 bp, Homo sapiens
  misc_feature (1)...(293): n = A,T,C or G
aaaagatgctgcttccctgttttcttccaggaacacagagaccaacacggnttcaaacacagggcgagcttctcactatttcctgggaatgttacttctcagcccaacacttctcttcccaagaagttcaagttttgagactgtttttctccccggaacagtacttaaaaaaaaaaaaatcnttgatnttcaaanatgggttnttttcgtgtcctggaanagcatcagtaactaaatatcaagttntccacaatgctgccccccctggggggctaaccggatgccaagggaga

SEQ ID NO: 1685 - DNA, 390 bp, Homo sapiens
aaattgtctaactcctatcccagtttctttttatagtctaaaaacaaggaatcacccaagtaagatactccttcagagcactgctgaaaacggatcaaacgtagagatcccccagatccctgttctcaagtgttaaaaatattttatattagcacatagaatacccttagatatattctgttatgttctaaagagtttgtgtttccccctttttgatgatgtcttcaatttcttctgagacctttcctgtatagtcatttggttctattgcttttaacttctcttgatactccagcggcaaaccattttcttttgcacccatgcaaataatctttttatactgtggggatgggggagcactttcgtaatttgtcatcagataacttcgac

SEQ ID NO: 1686 - DNA, 549 bp, Homo sapiens
gggtccagtccaacctgctcctcattattgtaaacatgtgcagaatcaatatggtggaacccggcttctattgccaatttgacggcctctagagctttacttttaggaacctgggggagcaaccaaacgtaatattttctgactaatgtgcctgagagttagttcgggcacaagcagcaacgttcacaaaaatcagcttttcctcctttcttggatgagctctgtatgtagaatcataagcccatcccagtctgactgggtctttcccatttagtaataaaggttgggcatagcaggaacttctgcagtcccagaaaaatcactgaaagtggaagtgtccccaaaacaatttcactttcagtgattttttggaaaaatcaacaggacgcaactatagttacagacataatcttaattatttttagtatggtgaaattaacacaaggaaatagccacatggaaggaattatgaaggaatgcagtgtaagctcctgtgattcctctcccaccatgttgcacagagcgcactgactttatccagcatcatat

SEQ ID NO: 1687 - DNA, 442 bp, Homo sapiens
  misc_feature (1)...(442): n = A,T,C or G
caactgcaaatgaagatcctttttggatacttgntgagaaagacacattngggggggggttgtgacnaaaataacgatggccggcttgatccccaagagctgttaccttgggtagtacctaataatcagggcattgcacaagaggaggcgcttcatctaattgatgaaatggatttgaatggtgacaaaaagctctctgaagaagagattctggaaaacccggacttgtttctcaccagtgaagccacagattatggcagacaggctccatgatgactatttctatcatgatgagctttaatctccgagcctgtctcagtagagtactggctccttttataatttgttaccagctttacttttgtgataaaatattgatgtngnnttttacactcttaagtcttaaccacagtcacaattatcttaatgtagatnataattg

SEQ ID NO: 1688 - DNA, 340 bp, Homo sapiens
  misc_feature (1)...(340): n = A,T,C or G
ctgccagctaacagcaagagctntgagggcatcactgaacagatagcacctnatgngntntnatgattcaaaaatctcccttgctgttggatttaccaacacgtaggcttttatttcttcccattacatctgtttagccacagaaagcatcgggccatactcactgcagaagataagacttcctcagaatcttatttgtttagtgcactcaattttacttcactgtctcatcacttgagagactggttaaggcaagaaacccatttcttaacattttttttgttttcaaacatttgaaaagcaacaccaaaacgtatgcagttaattcctcaattctttc

SEQ ID NO: 1689 - DNA, 140 bp, Homo sapiens
  misc_feature (1)...(140): n = A,T,C or G
ccagagggcctgcacatgcaatttccagtccctgccttcagagagctgaaaagggggcctnggtcttttatttcagggctttgcatgcgctctattccccctctgcctctccccaccttctttggagcaaggagatgcag

SEQ ID NO: 1690 - DNA, 485 bp, Homo sapiens
gagattattacccagaattcacatgtagggatggggaaggacaatttttttttaactaaaaaagttggcggcaggggtggggggtggcaatcatttttcttcctatacatacaaaggatattgtcaaaaatggcgttcttctcttgtggcctgttattctgattgctgctgtatacagttttgtcactctttagtttttagttaagcatactgatagactttcctctaaaagccattcactccagattttacctggggaatattctacatactgcttactttctctataaaactcatcaataaatcatgaaaggcactgagttttgtaaatcaggaccctaaatgtttaattgtaaataagtttcagataattattatagctttgcgttgaagtttgttgttttttttctcaactagttaagtcaactgcttctgaaataactctgtattgtagattatgcagatctttacaggcataaatattt

SEQ ID NO: 1691 - DNA, 342 bp, Homo sapiens
  misc_feature (1)...(342): n = A,T,C or G
gaagaaacaangatgacttttttnanaacaaagcataatgctggcaatnnngnggggggtnnagttttccaaacatgttatcttaaatacccctttatccttacaggttgacataactttgaatgttttaacagcaagaatnttaagaaaagataaacaccattttatttatntataaaaacaaaattanttncaaatatttttgacattgtgattttttttttccacatttctcagcaaanctaatggnattttaatcattatttttgcctgtcataagaaaactcttanctgaaatggccnnaaaactgtganacatgctatggaanctgaatgccggac

SEQ ID NO: 1692 - DNA, 450 bp, Homo sapiens
  misc_feature (1)...(450): n = A,T,C or G
aaaaatggggccccaaagactgntaagagctcatccccgtggtctcctatcaccggggnnggggttcatgtctgatgagaagcttggacggtactgaaactcatacatgtaggtgggtgctccagcatctctgtggttccgggccacaatcacagatgggacaccaaacatcacatctgctatcaagtccaggaacaggtctttctttttgacagtgtcgtctgttcctcctaagtatttctcagtggcttctggaatcagttccttagcaatgcaaacaaggggataggacttccacaggagtgacatggctgtcttctggtccagttgcccttcggagagtggatagctcatcaactgcattggaatcaaccagccaaactcctgcttgttaattccgaccatgtangggacagngtggaaattcctttcagcttgaaagctcttcag

SEQ ID NO: 1693 - DNA, 436 bp, Homo sapiens
  misc_feature (1)...(436): n = A,T,C or G
ctattttattaacatcatgntttaataaataactggctacttctaataaanngggggnctcngtttacaacagcccccaatattccattttgaccactctgcagaatttggtgtaaaaagttgaatgaaatgtagaccctgagctatcaagtaattatgtttcaatataaaaatagagaattactcttacaactgaagattgaacaataacacaaacaacctctttgtgggttttaggttcggtaaaattagttgggatcttaatggctgtctaaagcaggaaganacagaattttaatctttctgaagacttctgggaactnctttgaaagngatttgttaccttatcagagtttatgagctattattttggtnaaggcacaangaaaggattcccangnngttgntantcttttgccctggacnacaaanattg

SEQ ID NO: 1694 - DNA, 313 bp, Homo sapiens
  misc_feature (1)...(313): n = A,T,C or G
attatctgcaaggtttttttgtgtgtgtnttngnttttattttcaatatgcaagttaggcttaatttttttatctaatgatcatcatgaaatgaataagagggcttaagaatttgtccatttgcattcggaaaagaatgaccagcaaaaggtttactaatacctctccctttggggatttaatgtctggtgctgccgcctgagtttcaagaattaaagctgcaagaggactccaggagcaaaagaaacacaatatagagggttggagttgttagcaatttcattcaaaatgccaactggagaagtctgttttt

SEQ ID NO: 1695 - DNA, 522 bp, Homo sapiens
ccattttcaggggaagcttgggagagcaatagtatggtgagccccttagagatgagcgcctactccttcttggcgaatgctgccttcagatgcttaccaagtggtcactgcatctagtaagattatatttccagtacacttccttagggcagaaacaccatcctatcaggtttggtcagtcccttcttcatgaagggagtcatggggaattcctgaaaattttcttccttctgcagacagttggatgagtcccttagagaaggcatccagagacataactaaactgaatatcatcccatattgattttaggaattgactctaaaactctgtgcagaatcttgtgttgggattgtatcttgacattcctgttgtgttatttttcttaactggagtgtgtgctgcctttcaggtacaatttttgtgtaataaaagccagtgcattaagtttatatagactactttctatgcaagactgagatatggaatagataggaagagatatgtactgctgggtacatgga

SEQ ID NO: 1696 - DNA, 174 bp, Homo sapiens
  misc_feature (1)...(174): n = A,T,C or G
ccagccattgcctggcatttggtagtatagtatgattctcaccattatttgncanggaggcagacatacaccagaaatgggggagaaacagtacatatctttctgtctttagtttattgtgtgctggtctaagcaagctgagatcatttgcaatggaaaacacgtaacttgttt

SEQ ID NO: 1697 - DNA, 561 bp, Homo sapiens
  misc_feature (1)...(561): n = A,T,C or G
ctgtaatgttattgcagatccncatctctcgctcaactgttaatgtctcaacctnnagaggcaccccacccagcacactgtcagtaaaggggcagattgaaacagtgagagttaagggtacagtagaaaattctgcatgtttgcagtgactagaatcagatagtagtgtggtggtttttttttttaatcattatgaanagtgggagcttgcaggtaaggcttctgtggtggtttgaaaagcagaaagcaataaatgaaacaaagngtttgtgtaatatattcctgccttgtcttcttcactcagagttgaaataggttttgcagtaaagctggaaaaaaaaagaaaacaaatgttcaaaactgtgtgtgttggngggnggaatttcctttgcttatagnagtttcagagnaactatatgttttttttcctttctttttcacaggcacagaaaactgaatctgtanataacgagggaaaatgaattgcatgaaaaattggggttgattttatgtatctcttgggacaacttttcctcggccgcnaccacnctaagggcgaat

SEQ ID NO: 1698 - DNA, 267 bp, Homo sapiens
  misc_feature (1)...(267): n = A,T,C or G
cgaggtctgccctcgattgtgtatttctgttggatcaaacactcccatgttaccactnggcnncataatgtatcgatatatattccaagtggcaacaggtaagttgagaaggaagatgaaccagtgcaatgacatgagcagtaatacagtgacaatggtatggccacttaaattaaaaatataacaaaattgaaaaatagacatataaccaaaaagattctaaatcttgcaaggaaaaaaagaataaagctgccaataagttatttt

SEQ ID NO: 1699 - DNA, 449 bp, Homo sapiens
tgttaagattttttttgctacaaagaggaggtggcaatggtagatccacccttatgcttctcagtttagcataacctcttatggattttcatcaaattcagcgtgttggtcactggaaagagccttttccttctccttttcttactctcccctcatggtgttcccctcttaaaggagaggagcttttaatttacacttaccacctcatttgcttttctggaggccatgcaatataggcgggactacagagttaatctcctttttacaaatgaggccaagagaagcctcattggttcacagtcatgcagctcatactgtccacccttgtattctcagatgcaggacaattgcattttagttttattttgtggaggtgcagaatatttactctttctgtccaacccttgattctgccgaggaagacactgatggtttgatgagtgattcag

SEQ ID NO: 1700 - DNA, 398 bp, Homo sapiens
acatttcacaaataagatgtagctttccaaacaaatccattcgatgaccattatcacaactatattttattctaatttataaaacaaaaaatggttagacaagcacatgatatcaagagtcttcaacacagtggattccattttattaagaaaaaaaatagaaaacaagtagtccttaaattgtcttagctctccatagcatacgttatataaaattaaagttttgcttccaaaaatatgtttccatgtggtcgtggtgttgtccagtgctattagggccaaagcaccaaagacatgagaagtttaaccatcgacttgtcatttttcataaaagctaaacatttccttataggtctggagtaaaatcttctaggcattttagtgctaaaagtcacttt

SEQ ID NO: 1701 - DNA, 257 bp, Homo sapiens
  misc_feature (1)...(257): n = A,T,C or G
aaanaacactannggaccttagagatnataactgtttgataatttgnctcagncgtattgncntaaaagatatatnnnnggggggnnnntcnntgtnaanngntgtttggattgcctgatattatancnnggnngttgggnnntatntnacncantatacctcngncgcaaccncgctaatggcnagnatcatnacactggcngncgttactactggatncgagctcngtgccaatnncnncgtcntcatngcccta

SEQ ID NO: 1702 - DNA, 526 bp, Homo sapiens
  misc_feature (1)...(526): n = A,T,C or G
acctaattnattgaagtaataaccaaataattttcaatcttgattcaactgtgattcaaatcttacaccatttgcccacttctatgaattttatgtataaaattttttaagagtcagagttttttttcttgattaattggatgtatttcacagaatttccaactgctcacgttagttttcttccttttagagttgatctctctaatgtattagatcttcatgcctttgatagtctctctggaataagtttgcagaaaaaacttcagcatgtgccaggaacacaacctcaccttgatcagagtattgttacaatcacatttgacgtaccaggaaatgcaaaggaagaacatcttaatatggttattcagaatcttctgtgggaaaagaatgtgagaaacaaggacaatcactgcatggaggtcataaggctgaagggattggtgtcaatcaacgacaaatcacaacgagtgattgtncaggggggtccatgagctctggtgatccgggaggagactccaatgagctg

SEQ ID NO: 1703 - DNA, 116 bp, Homo sapiens
gacctccgaactgagctctaatttagctgatcagattttgcttgggtaaagttcctttttaatgttctaaagtgtttacggttctcaaatatcagttaaaaactaattttaggtgg

SEQ ID NO: 1704 - DNA, 241 bp, Homo sapiens
  misc_feature (1)...(241): n = A,T,C or G
aaaaattgtgtaattgttaaatgtccagttttgctctgttttgcctgaagttttagtatttgttttctaggtggacctctgaaaaccaaaccagtacctggggaggttagatgtgtgtttcaggcttggagtgtatgagtggttttgcttgtattttcctccagagattttgaactttaataattgcgtgtgtgttttttttttttttnaaggggctttgtttttttttntcaanaaaaat

SEQ ID NO: 1705 - DNA, 336 bp, Homo sapiens
  misc_feature (1)...(336): n = A,T,C or G
ggtcctgtntanacacacatcaatatgaaacaaaaaaaatttatataaataagtcaattaaacttcacaaaaactaaagaaacacaagacaaaaatccaacaagcaataaaaactgtacaatattggtcagtcttttatatctgaaaaatgtgtaacttaaaaaaaagttatttatcgtataaaaaaagtcttttacatctgtgttagctggagtgaaaacttgaagactcagactcagtggaaacagatgaatgtccacctcgctttcctttggagaggatcttgaggctggaccctctgctcacagaggtgagtgcgtgctgggcagaggtttt

SEQ ID NO: 1706 - DNA, 107 bp, Homo sapiens
agggtggctctgggagcagttgtgctgcgggcttgctgggggagaactctaactgttgcagaaacagagcttcatggcttgcttaaattacttagctggaatatttt

SEQ ID NO: 1707 - DNA, 512 bp, Homo sapiens
  misc_feature (1)...(512): n = A,T,C or G
ttttttgtctggtaattatatatttattatttagcaaaactgaagaaaaaaagcacagaattgtttcaacagatgtctctcattttcagctagcatttctctcccaagttgagctggtttaatgtgttttggatttccctcctcaattggcttattttttagatcacctgcaattcatttgcaaattgcaataaaacacattttagaaaaaaggaaccttcaattattagctttgtttctttttaaatgtatatattttgactaatgtttgtgaatgaagttggctaacatgtatttagtttcattttggcggtatgtaatataaagtttttaaaattttaaatatggttttaacctttatgtgtaaatgattttctagtgtgaccttctaatttaatattagacgtctaaggtatatctgtaaattagaatccgactatcactctgttcattttttttgaacaaagngnttaaagaaagcctgaaccagggaaaaaaaaaaaaaaaaaaaa

SEQ ID NO: 1708 - DNA, 203 bp, Homo sapiens
  misc_feature (1)...(203): n = A,T,C or G
aatcttctaaaggaagaacagacccccnagaataanattacagttgttggggttggtgctgttggcatggcctgtgccatcagtatcttaatgaagactataatgtaactgcaaactccaagctggtcattatcacggctggggcacgtcagcaagagggagaaagccgtcttaatttggtccagcgtaacgtgaacatcttt

SEQ ID NO: 1709 - DNA, 271 bp, Homo sapiens
  misc_feature (1)...(271): n = A,T,C or G
ngttgaaaaaatagatccaatcagtttataccctagttagtgttttgcctcacctaataggctgggagactgaagactcagcccgggtggggctgcagaaaaatgattggccccagtccccttgtttgtcccttctacaggcatgaggaatctgggaggccctgagacagggattgtgcttcattccaatctattgcttcaccatggccttatgaggcaggtgagagatgtttgaatttttctcttccttttagtattcttagttcttcag

SEQ ID NO: 1710 - DNA, 239 bp, Homo sapiens
  misc_feature (1)...(239): n = A,T,C or G
tacaaaatattttaattgtaagtggtcagaggaattcttctggtttctcccttatggntatttttaatttgtacaatagttgcttctgtcaactcagcgacaatgccatcatagctttcaaatgagatcaccctgtagatcgatggactatgccttaaagttgcagatgcataaaggagactgaggacaaatggtgaaaactgtagttactgaacccaaatgttactcagagatatcaa

SEQ ID NO: 1711 - DNA, 122 bp, Homo sapiens
agtgtaagtgaacacagaagagtgacatgtttacaaacctcaagccagccttgctcctggctggggcctgttgaagatgcttgtattttacttttccattgtaattgccatcgccatcacag

SEQ ID NO: 1712 - DNA, 169 bp, Homo sapiens
ttcccataaataaaagtacagttttcttggtggcagaatgaaaatcagcaacttctagcatatagactatataatcagattgacagtatatagaatatattatcagacaagatgaggaggtataaaagttactattgctcataatgacttacaggctaaaattagtttt

SEQ ID NO: 1713 - DNA, 392 bp, Homo sapiens
tgacagagaggatggcgctgtcgaccatagtctcccagaggaagcagataaagcggaaggctccccgtggctttctaaagcgagtcttcaagcgaaagaagcctcaacttcgtctggagaaaagtggtgacttattggtccatctgaactgtttactgtttgttcatcgattagcagaagagtccaggacaaacgcttgtgcgagtaaatgtagagtcattaacaaggagcatgtactggccgcagcaaaggtaattctaaagaagagcagaggttagaagtcaaagaacatattcttgaaagttatgatgcattcttttgggtggtaacagatcataaagacattttttacacatcagttaatatgggattattaaatattggctataaaa

SEQ ID NO: 1714 - DNA, 301 bp, Homo sapiens
tgggagggatattttcccacaggaacaagggtctccgtgatgacacggggtctctatagtcatgttgagagcctaatggcccttggcataattgctggtgttggggtagaaggtgtcttggagtttgctcaagtggttgagagggagggaggtgccatagacttggaggaactggcacgaagccaaggatacaaatccaggcagggctgtggggcaggatagggagcagggccttctactgaaggagtgactcaggaaggaggaggggaaggtgacaagcccctgggcaggagccctgtgg

SEQ ID NO: 1715 - DNA, 194 bp, Homo sapiens
taaattcaggctaacttctgaaaatcccgttttattcacctcactgtggtaccagtaactatactgagtcaggttactttacagttaactatgtcacctaaaacacaataatccattaacactctaataacagttattgggtgtggtcatactggaaattcttaaccatatagttgtcttgccaattttttttt

SEQ ID NO: 1716 - DNA, 185 bp, Homo sapiens
gtaggaatgggttcttggtacacaagatagtattgttgagctagttttcgagctctgtgcacaagcactctttaattcccacggacggggctcctccagctacagcagccaaagcatattcaatctggacaagtttaccagacgggctgaatgtagtcagcgaaaaactgtacccgcgctccgcc

SEQ ID NO: 1717 - DNA, 296 bp, Homo sapiens
  misc_feature (1)...(296): n = A,T,C or G
aanaggctcttggtggagaggactgtgaagccgtcggcaggtgtgccctcggttgtgccgtcggcgctggctgccttactgacttcaccctgcttcttcttggatttccgggcccctttcttgcctcctgcttttttagatgcaggcttcttctgggatggagacttggcctttttggctgggggtggtgtgatgatggcttccaactttcctttggatccccgcttcttcgctagcaactcggggtggatgttgggtaacacacccccactggctatggtgactccttttagcag

SEQ ID NO: 1718 - DNA, 343 bp, Homo sapiens
  misc_feature (1)...(343): n = A,T,C or G
atggcattaattgttccttgcttttatagggtgtattttgtacattttggatttctttatataaggtcatagattcttgagctgttgtggtttttagtgcacttaatattagcttgcttaaggcatacttttaatcaagtagaacaaaaactattatcaccaggatttatacatacagagattgtagtatttagtatatgaaatattntgaatacacatctctgtcagtgtgaaaattcagcggcagtgtgtccatcatattaaaaatatacaagctacagttgtccagatcactgaattggaacttttctcctgcatgtgnatatatgtcaaattgtcangc

SEQ ID NO: 1719 - DNA, 193 bp, Homo sapiens
tcgaggacccccgagatgcagaggatgctatttatggaagaaatggttatgattatggccagtgtcggcttcgtgtggagttccccaggacttatggaggtcggggtgggtggccccgtggtgggaggaatgggcctcctacaagaagatctgatttccgagttcttgtttcaggacttcctccgtcaggcag

SEQ ID NO: 1720 - DNA, 176 bp, Homo sapiens
  misc_feature (1)...(176): n = A,T,C or G
tgattcagaattttttttaatgaaaggatnattgcactaaccttcttcctgctgctctgattctgcatttgtggtacttgtgactacgttntttcaaatatagatagatttaagctgctaatttttttttttttagtaaccactnctatatcatgtcttttactctgntnataata

SEQ ID NO: 1721 - DNA, 128 bp, Homo sapiens
  misc_feature (1)...(128): n = A,T,C or G
tattcttangaaacttccctaatcccttggaaattcccgggtccttcaagaataaaaaaaaaagggtcaagaagaacaaattaccaaagggaaagaatggctttcaatataataaggtccatttttta

SEQ ID NO: 1722 - DNA, 285 bp, Homo sapiens
  misc_feature (1)...(285): n = A,T,C or G
ttatgaagttgacaaataaataaaaggtagtggntatgtctgagcttattgtgtttgagctaacaccaggttactcagtaaccatgacctgctcctccatttccatttattctcaacattaaatagttttatcttgttgntgccagaaatgcacttgtgccaggnattgnccctgctgtatgaaaagcttcttggcaatgaattctgtaataagtgccctacattatggntttctggtggaattggtttaacagngacaacccaggatttccaatatatttttgt

SEQ ID NO: 1723 - DNA, 536 bp, Homo sapiens
  misc_feature (1)...(536): n = A,T,C or G
cttggcttgcaggtggcaccttctcactatgtnctcacatggccttttctctgtggagagggacannnagcatgagcaggctctggtgtctcctcttcttataaagacactaatatcaccatattagggcttaaacctatgacctcatttaaccttaaccccttaaaggtcccatctccaaaaacagtcacatagcaggctactgcttcaacatatgcatttgggggaggggacaccattcagttcttaacagggtggtcaccgcaaacatggaaagtcagagccttctccccttcagaattcccgcccccacccagggatggggaagaggagcagagaggtatgggaagcagacacggagagtggcaggtaccatgctggggtgggctcaggagtgctttcgganggacatatggaactggcagggctcaatgcanggagggcggaagnccttgggaagancccgtggcctgagaaaggggctgggctacaaccctnggcaagttactttaccnntgaccttcgatgcttttggg

SEQ ID NO: 1724 - DNA, 145 bp, Homo sapiens
  misc_feature (1)...(145): n = A,T,C or G
ctgnccttttgnaacaggaccctcacnctatncaatggggggttnanntgaagcatgancntatncatgcggaaaacccaactcatgtgagcncaaancggancgacccagacaaccatgnatgcggctaatatggggagagaaa

SEQ ID NO: 1725 - DNA, 173 bp, Homo sapiens
caattctggaattacccacttgtttaattttgagcaacatgatctagcattaatgtagtcacattctaaatcagacaatgtaattatgaagtagaccgagaggaagatgagcgcgcaacaatcgaggagagagaagacgaacaccaccgcctccatcctcctcctccgtcgcc

SEQ ID NO: 1726 - DNA, 302 bp, Homo sapiens
acccgttggaaatgggccatggtctaatttggtgttgaaataaactaacctctttggctgtttctcccaaactgccaccagccaggcaaggccaatccaatactgactgctggctgggggagctcgtaatgggtgatgccgccctgctttttgcatatgtcaggctaacaggtgctttatttccagagaattgttaatgcccttttttgaaaagagcagcagaaattccggacaagaatctgaaaaataggtgtcaaaaactatttcccagaaggtagctgtacaggagtttgagtctccag

SEQ ID NO: 1727 - DNA, 274 bp, Homo sapiens
  misc_feature (1)...(274): n = A,T,C or G
ttnngttgaaaaaatagatccaatcagtttataccctagttagtgttttgcctcacctaataggctgggagactgaagactcagcccgggtggggctgcagaaaaatgattggccccagtccccttgtttgtcccttctacaggcatgaggaatctgggaggccctgagacagggattgtgcttcattccaatctattgcttcaccatggccttatgaggcaggtgagagatgtttgaatttttctcttccttttagtattcttagttcttcag

SEQ ID NO: 1728 - DNA, 415 bp, Homo sapiens
aaatccctttctgcttccactggaggcaaaactgaacaaaatgttagttaaatagagagagcagcatttctaagaaatctgtggtcagcattatagaccatctatgctacaaggatgtcattaaataggatttgttcaattactggattcttcttctatgatcagttatagaatttctggtttatatctctgattcataaaactgggactccactttttgaagatacatctgattgatttttttcagtcatgatttaacagacttctttgagatgctcattttaacatttacataatttataatcccaaatgtataaaagacaatgaaaaaagcatcataaataaataatgcaaaatgaaatagttatgtcagacttttggaccttctgataaattagcaaaactgtaacagaaa

SEQ ID NO: 1729 - DNA, 309 bp, Homo sapiens
  misc_feature (1)...(309): n = A,T,C or G
acanaccgtatactttatgcaaacaaagtgatgcctcactgacttaggagacaagtcacatgccatcagtgtgtcagaaaatttctttcttcagtgatagttaaggtaacctcgccagctactttccagagacagctccagggcaatactggggaaaaaaaaatcagagacataggaccccaatagagccctgtgcaacaaaaagatgctagataacaaaactcaaagcaaaactaagatcattccaatttaggggaaagtttttttattcagtgtttaagattaaaaactacaagattttgcttgcag

SEQ ID NO: 1730 - DNA, 285 bp, Homo sapiens
  misc_feature (1)...(285): n = A,T,C or G
anctgtactgtatttatgttgctattggtcaaaagagatccactgttgcccagttggtgaagagacttacagatgcagatgccatgaagtacaccattgtggtgtcggctacggcctcggatgctgccccacttcagtacctggctccttactctggctgctccatgggagagtattttagagacaatggcaaacatgctttgatcatctatgacgacttatccaaacaggctgttgcttaccgtcagatgtctctgttgctccgccgaccccctggtcgtgagg

SEQ ID NO: 1731 - DNA, 244 bp, Homo sapiens
cattaccttgctaaaatttccactaagctacagcttcagatatttacaagaaaaataaatatcttttaacagacttcaatgtggtttaacagcaagctagctgaggagttgtattttgttgttatttcaggtaactttttattaagaaacagttaatatttcagcgattacaatttcaggtgttcaaaactcaagaagggtcatcattatactctgaagcagaattcttcaggtactcatcttt

SEQ ID NO: 1732 - DNA, 272 bp, Homo sapiens
  misc_feature (1)...(272): n = A,T,C or G
ctgggaagncagttcgttctctcctctcctctcttcttgtttgaacatggtgcggactaaagcanacagtgttccaggcacttacagaaaagtggtggctgctcgagcccccagaaaggtgcttggttcttccacctctgccactaattcgacatcagtttcatcggaggaaagctgaaaataaatatgcangagggaaccccgtttgcntncgcccaactcccaagtggcaaaaaggaattggagaattctttatgttgtcccctaaagat

SEQ ID NO: 1733 - DNA, 388 bp, Homo sapiens
  misc_feature (1)...(388): n = A,T,C or G
anttggaagagcatatgaacacgggccagctagcaggattttcacatcaaattagaagtctgattttgaataatatcatcaataagaaggagtttgggattttggcaaagaccaaatactttcaaatgttgaagatgcatgcgatgaataccaacaatatcactgagctagtgaactatttggcaaatgacttaagtttagatgaagcttcagtcttgataactgaatattcaaagcactgcgggaaacctgtgcctccagacactgctccctgtgaaattctgaagatgtttcttagtggattatcgtaaatcactgaacctttttttcaagaaggacaagaattttggagtctgctattaatgggaccatatttattacagttttt

SEQ ID NO: 1734 - DNA, 282 bp, Homo sapiens
tttggaatgtaaaattaatggtatctggtatcaagttgtaagaaaaactcccccagattgggaggtaactgagtgatatgtgaaagaatcttcccgtctgaatttaagaatacacctacactgggcagaaaaaggtgggggagaggaagtagaagtagaggaaaagcacaactccactggcttcaatcaaactgaggtaactaattagagacggaaaataaataaatcaacaaatgccccatttttgttttccaaaaaagatcactggcaactaacaatttt

SEQ ID NO: 1735 - DNA, 268 bp, Homo sapiens
  misc_feature (1)...(268): n = A,T,C or G
ntaagccagccttcctcaagaatgccagacagtggacagagaagcatgcaagacagaaacaaaaggctgatgaggaagagatgcttgataatctaccagaggctggtgactccagagtacacaactcaacacagaaaaggaaggccagtcagctagtaggcatagaaaagaaatttcatcctgatgtttaggggacttgtcctggttcatcttagttaatgtgttctttgccaaggtgatctaagttgcctaccttgaattttttttt

SEQ ID NO: 1736 - DNA, 478 bp, Homo sapiens
  misc_feature (1)...(478): n = A,T,C or G
tnatagacttttccaatggcccccttataacaccagaaaggattgtaatcttgggcgtattttgtgctggcatctttggcagttgtgaagatcttgtaccagagcgtggcgttgctgtacgtgtcaggaacacagtgcggtggctgtacagtgacggggaacaccccagggctggccgtgagggtcatgcaggctgtgaataccacctgctcacagtgaccgtggagggcgcagtcatctgagctccacgctgtaggcagggtgaaggtgatgtttatctcctcgtgggcttccctgcctgaaagtccaatctgatgccctaagatggttgagtacagatgggtgacgttgcgggaataccctccgaagggtttcagtgggtccagggttagggtgattgagactgagatattcaccgggcccgagtcctccagggcctggggggactgggtggaagctcgggcctgcccgctggtca

SEQ ID NO: 1737 - DNA, 489 bp, Homo sapiens
  misc_feature (1)...(489): n = A,T,C or G
ctttnaggatggcgagtagcagcggctccaaggctgaattcattgtcggagggaaatataaactggtacggaagatcgggtctggctccttcggggacatctatttggcgatcaacatcaccaacggcgaggaagtggcagtgaagctagaatctcagaaggccaggcatccccagttgctgtacgagagcaagctctataagattcttcaaggtggggttggcatcccccacatacggtggtatggtcaggaaaaagactacaatgtactagtcatggatcttctgggacctagcctcgaagacctcttcaatttctgttcaagaaggttcacaatgaaaactgtacttatgttagctgaccagatgatcagtagaattgaatatgtgcatacaaagaattttatacacagagacattaaaccagataacttcctaatgggtattgggcgtcactgtaataagttattccttattgattttggtttgg

SEQ ID NO: 1738 - DNA, 262 bp, Homo sapiens
gttacagatgacatgtatgcagaacagacggaaaatccagagaatccattgagatgtcccatcaagctctatgatttctacctcttcaaatgcccccagagtgtgaaaggccggaatgacaccttttacctgacacctgagccagtggtggcccccaacagcccaatctggtactcagtccagcctatcagcagagagcagatgggacaaatgctgacacggatcctggtgataagagaaattcaggaggccatcgcagtgg

SEQ ID NO: 1739 - DNA, 422 bp, Homo sapiens
ccaccatccttttgagacagttcctatcaacaatcttgaaccatactaatacattacttgttcctgaagtccttttgttgtagctcataataaaataagcaatacaaatgaattatctgtatttaagggaaaagaaacatttacaagaaaacacaaaaatataactgttataattcattatgaataaatatacactttgaactggctaagtacaatctttatacattgtttaagatttaatacagtttattagccattttcttttttcacacaatgtatatcaaaattaaaaaaaaatactgatttatagaaaaatggcaaagtacagtagttccattccaatttgaagggccatgaaaagccactgcaagaccttttagcctaattcaaacctgtaaacatgttcagtcttttttacctgc

SEQ ID NO: 1740 - DNA, 92 bp, Homo sapiens
gctaaatacctatctaatgtgctatgtttatcaaatcgtgtactaaaatggaaagctagttttgagaaattattcagaagccttgttatttt

SEQ ID NO: 1741 - DNA, 188 bp, Homo sapiens
tttcaattcttccaaaaggctcaaagatcccacgaagcatatcttcagttatgttgaagtgtaatgagcccacataaagcctcataggtccagcacttcccttttgtaaattgtttgccattgctgcagctctgtttttttctgcctgtgatgcctgtactatgattggcacgcctaaaactcgttgg

SEQ ID NO: 1742 - DNA, 285 bp, Homo sapiens
  misc_feature (1)...(285): n = A,T,C or G
ttnaaaatactttcaggctccaccaaaacgtagaactgaaagcatgtattttggaagaaagagatacattttgtatgctttcttttccttttgtagattcccagtttattttctaagactgcaaagatcactttgtcaccagccctgggacctgagaccaagggggtgtcttgtgggcagtgagggggtgaggagaggctggcatgaggttcagtcattccagtgagctccaaagaggggccacctgttctcaaaagcatgttggggaccaggaggtaaaactgg

SEQ ID NO: 1743 - DNA, 117 bp, Homo sapiens
  misc_feature (1)...(117): n = A,T,C or G
angatctatagacactttaggcaaaacaggctcataaagcaattaaaaaatcaacaatttagtaaaaacaggctacatagtattttgtttttacgtttcatttgtctattgatcttt

SEQ ID NO: 1744 - DNA, 111 bp, Homo sapiens
aaacaatgggctaaaaataaacagtattaaaaggttaagtttatataatacatatgtacacaattagtggtgttttcttttcagacaaaatactgaaacaaatattagttt

SEQ ID NO: 1745 - DNA, 305 bp, Homo sapiens
ctgccagtagacccccggtcaccctgaggctggtggtccctgctagtcagtgtggctctctcattggaaaaggtggatgcaagatcaaggaaatacgagagagtacaggggctcaggtccaggtggcaggggatatgctacccaactcaactgagcgggccatcactattgctggcattccacaatccatcattgagtgtgtcaaacagatctgcgtggtcatgttggagtcccccccgaagggcgcgaccatcccgtaccggcccaagccgtccagctctccggtcatctttgcaggtggtcag

SEQ ID NO: 1746 - DNA, 319 bp, Homo sapiens
aaaataagtgaataagcgatatttattatctgcaaggtttttttgtgtgtgtttttgtttttattttcaatatgcaagttaggcttaatttttttatctaatgatcatcatgaaatgaataagagggcttaagaatttgtccatttgcattcggaaaagaatgaccagcaaaaggtttactaatacctctccctttggggatttaatgtctggtgctgccgcctgagtttcaagaattaaagctgcaagaggactccaggagcaaaagaaacacaatatagagggttggagttgttagcaatttcattcaaaatgccaa

SEQ ID NO: 1747 - DNA, 177 bp, Homo sapiens
aaatccttttcccataaataaaagtacagttttcttggtggcagaatgaaaatcagcaacttctagcatatagactatataatcagattgacagcatatagaatatattatcagacaagatgaggaggtacaaaagttactattgctcataatgacttacaggctaaaattagtttt

SEQ ID NO: 1748 - DNA, 237 bp, Homo sapiens
  misc_feature (1)...(237): n = A,T,C or G
ctgaaggantgnaantagactggtngagagaggaaggcactgagccacatgaaggtatgtacgtaggttttgttcagtggaaatagactggtagagagaggaaggcactgaaccacatgaaggtatgtgtgtaggttttgttcagtggaaatagactggtagagagaggaangcattgaatcacatgaaggtacgtgtgtaggttttgttcactgacttcttcantgtctcagccag

SEQ ID NO: 1749 - DNA, 244 bp, Homo sapiens
  misc_feature (1)...(244): n = A,T,C or G
aaaaggccccattatctgacaaaatagatggtgaacatgcactatcccaggatatctattattatccaaagaagtgtttctcaaagngtggtccatggtactggtccatgaattggttgctaccagtcaatgaagagataaattacttgcatcagagtgtaaatcaatacattgctttagctattaataaaattttgctaaaaaatcaaatcctgtcattgacctaaaaagtatctctagattt

SEQ ID NO: 1750 - DNA, 289 bp, Homo sapiens
  misc_feature (1)...(289): n = A,T,C or G
aggccagcctccaccacgcacggcgaaaggagtgaactagctgggacacacacacgtgtgaatgcatgcaagcattcactgcatcttctccgtggactccctaccgctcttccatagccccccctttcagcctcactgtttctcgtgtgagcctatctgcttgggcagtccactcgggagggggtcatggagccaggactccctctaaataggaatggaaaggaccctgcagatatttttatcctanttgtgaaaacaaggtgcctctgattctctatatccatcacag

SEQ ID NO: 1751 - DNA, 594 bp, Homo sapiens
  misc_feature (1)...(594): n = A,T,C or G
ctggttattaatcacaagtcctggaaatggtctaatgaccgtgaatttgataaactcggcagagtctaagatccttctcatggagctgatttccaggtagctgggggctttgaaggacacccccgggggcatgccatcaaccaccacacagccagggttaattgtgattttcctgtagggaactttcacaggaaaacccataccaatagcttcaccaaatttccgactaaagaggtcattcacttgttctcttagctgtctagctttttcaactttcgagagtctttcattatcatcatctggaattgtcacctgaatgatgttaaggtcttcaacacctgatgcagtagtattaacattgggtgatgaatttatttttctgggagggctcttagaggaggtgctctccttaatcgccgtctcaaacatttcgggctttttaatgatgaacttaattttggctttgtttctgagtatcttctccagcctcggaatgccaaaagtcgatggtcttcggaatggcacaccctcaggtaagccttccacataaaagtcttncgggaaagactcaaataacgcgaacggcaccttcac

SEQ ID NO: 1752 - DNA, 311 bp, Homo sapiens
ctgaaggtttcatggctcccaaggcttggaccgtgctgacagaatactacaaatccttggagaaagcttaggctgttaacccagtcactccacctttgacacattactagtaacaagaggggaccacatagtctctgttggcatttctttgtggtgtctgtctggacatgcttcctaaaaacagaccattttccttaacttgcatcagttttggtctgccttatgagttctgttttgaacaagtgtaacacactgatggttttaatgtatcttttccacttattatagttatattcctacaatacaatttt

SEQ ID NO: 1753 - DNA, 587 bp, Homo sapiens
  misc_feature (1)...(587): n = A,T,C or G
ctgtccattatacaccgtcacgttgatccctgcctccagcaactcgtccacaatgctaatgactggcttcatgaagtcctcctccatgttcacaaagacgttggtagcctggcctccccaggattgatcctcaggaataattttgagcttctttctgatggggccattcatgagctggcttaaggcatctcgttgtaggtgtctcacgtggcgctgacaaagacaaactaggtggctctgtgtgaattctagactcgactccattgtagacgtgggagtgcttttagttaagatgttatagaagttcaccccatctgtgttctgttcaatgatcatttctgctttcccccacagctctgtggcctctctgtagagccccttatttacggcattcagtacttgctctgcaaccttagacacctctgccagacctttgtcttcgagaagagacatgctgtacaggtaaggtccccaggagagcaccgaatcaacaggggagatccaggaatcacccaaggcaacccccgcaaagttgcacttgatggtccctcnctgaatggncttataaagctctagaccaatgccag

SEQ ID NO: 1754 - DNA, 564 bp, Homo sapiens
  misc_feature (1)...(564): n = A,T,C or G
cctctctccttggcttgcaggtggcaccttctcactatgtcctcacatggccttttctctgtggagagggacagagagcatgagcaggctctggtgtctcctcttcttataaagacactaatatcaccatattagggcttaaacctatgacctcatttaaccttaaccccttaaaggtcccatctccaaaaacagtcacatagcaggctactgcttcaacatatgcatttgggggaggggacaccattcagttcttaacagggtggtcaccgcaaacatggaaagtcagagccttctccccttcagaattcccgcccccacccagggatggggaagaggagcagagaggtatgggaagcagacacggagagtggcaggtaccatgctggggtggctcaggagtgcttcngaggacatatggaactggcagggctcagtgcagggaggcggaggccctgggagagccgtgtcctgagaagggcctgggctacaaccctgggcaagttacttcacctctgagcctccgatgctctgtgaaatggaaggaatgtgcttgcctgtcag

SEQ ID NO: 1755 - DNA, 214 bp, Homo sapiens
aaatgtgatgttttgagcatcaaaaagctactatctaaaaggattagtctcccagtgttcttggtaaatggggaaggttaggaaggaggcaatgatccaatgaatatagaagaactggccgattcacaggaaacttgctttggataaggtgagtcaatgggtgatattgtgcaggcagggagggaaatttctttgtacaaattcatgtccctgg

SEQ ID NO: 1756 - DNA, 225 bp, Homo sapiens
  misc_feature (1)...(225): n = A,T,C or G
aaaattannacatacatggtcaggcagcttctgtccatanntaaactattccttttcagtctgagtaatatgcggnttgttcttaatnncncacattaanaatttatttagattggtgaaactatctttataaaaaaaaaatncgaacatgaatgcaaacttaccaaacagagcccactanattgatnaagttaatnccannatagtttgccatganctgggtgg

SEQ ID NO: 1757 - DNA, 282 bp, Homo sapiens
ttgcagcctgcgatgacacagcgaatctatgacaagtttatagctcagttgcagacatctatccgggaggaaatctctgacatcaaagaggaggggaacctagaagctgtcttgaatgccttggataaaattgtggaagaaggcaaagtccgcaaagagccagcctggcgccccagcgggatcccagagaaggatctgcacagtgttatggcaccctacttcctgcagcaacgggacaccctgcggcgccatgtgcagaaacaggaggccgagaaccagcag

SEQ ID NO: 1758 - DNA, 473 bp, Homo sapiens
ctgaaacagcttttcaagctctctctcctcgtcaaggatcatgagaggcactccactcaaggggaggtgcgcaatctggtgctcttcaggcaggtcaaaactctcaaagtctagaggattgaagggaaagaatttttctatttctggataggcatcatctgaggcaggaacagagctttttgctttaacagtcttctcagtcatctttttggcagaaaagcttggctgtttttgtttgaggggtcccttggtctttacagacttttctgtagctctgttgacagttcccaaagcctttctagtagctttaggtaaggctggtggggcatcgaacgttttgccaaaacgtggtgttgaaacttgagatctcccatctaaggctttgattgaaggtccagaccccagcttcagcccatccttagcaaccacacgggtgcctggttctccattttccttatcgacatagatcagag

SEQ ID NO: 1759 - DNA, 187 bp, Homo sapiens
aaacttcgccatgatcgtgtcttctgcactcatgatatggaaaggcttgatcgtgctcacaggcagtgagagccccatcgtggtggtgctgagtggcagtatggagccggcctttcacagaggagacctcctgttcctcacaaatttccgggaagacccaatcagagctggtgaaatagttgttttt

SEQ ID NO: 1760 - DNA, 564 bp, Homo sapiens
cctctctccttggcttgcaggtggcaccttctcactatgtcctcacacggccttttctctgtggagagggacagagagcatgagcaggctctggtgtctcctcttcttataaagacactaatatcaccatattagggcttaaacctatgacctcatttaaccttaaccccttaaaggtcccatctccaaaaacagtcacatagcaggctactgcttcaacatatgcatttgggggaggggacaccattcagttcttaacagggtggtcaccgcaaacatggaaagtcagagccttctccccttcagaattcccgcccccacccagggatggggaagaggagcagagaggtatgggaagcagacacggagagtggcaggtaccatgctggggtggctcaggagtgcttcggaggacatatggaactggcagggctcagtgcagggaggcggaggccctgggagagccgtgtcctgagaagggcctgggctacaaccctgggcaagttacttcacctctgagcctccgatgctctgtgaaatggaaggaatgtgcttgcctgtcag

SEQ ID NO: 1761 - DNA, 413 bp, Homo sapiens
ctgtcttctcatctatcttagcataggagtcctctgctgccttttcaataccgtcgtggtatttctccaaagcagttttcaagtttagaaatatttcctgggacttcagtttctccctttcagcagcatcttttagttgttgaattccaagtttaattttttggatttcttgattaattgtggttactcgttcatagacagcacctcttttttcttgaactttattgcaatcctcaattactgtgcgtttgtattgcttaacatcttcatgcttcttatttattttgaattgtgctgtggcaagtttttccttcttcacaatcatcagtcttttgaacgaattttcttcagtcttcaatttcttcagttctgactcatcactctcaatttggtcctccaagttcaggcttctg

SEQ ID NO: 1762 - DNA, 315 bp, Homo sapiens
ggaaaagaaagagctgaaaatgcagaaagccgaagagttagaacttttggatacaggagaagaaacagcggctccactacagacccagccccaggttcaatgtcctccgaagaatgaagtctttccctggtgatggtcccctgccctgtctttccagcatccactctcccttgtcctcctgggggcatatctcagtcaggcagcggcttcctgatgatggtcgttggggtggttgtcatgtgatgggtcccctccaggttactaaagggtgcatgtcccctgcttgaacactgaagggcaggtggtgggccatgg

SEQ ID NO: 1763 - DNA, 114 bp, Homo sapiens
  misc_feature (1)...(114): n = A,T,C or G
cgaccgcctaagagtngcgctgtaagaagcaacaacctctcctcttcgtctccgccatcagctcggcagtcgcgaagcagcaaccatgcgtgagtgcatctccatccacgttgg

SEQ ID NO: 1764 - DNA, 114 bp, Homo sapiens
  misc_feature (1)...(114): n = A,T,C or G
ctaatacgactcactatacggctcnagcggccntccgngccgggggctgctcnggttagatngacatgaanaccctacagntnccactgtggnaattgaaantatccctcatgt

SEQ ID NO: 1765 - DNA, 485 bp, Homo sapiens
aaacagtaacaaaacagaaagcaagaatcactgaacactgggtgcagtcagttctaagtccttataataattgccaaaattatttgaatgattcttcaagattaggctgatccctggctaaggtctgtgtaaggcagacaagcgttattgatcatatcaagttccctacaatatcctgtcctcaaaaccggaagcaatgaacatgatcctcttcggttggataaatgaacttcctgtttggcctgcttctaggccctgccagattctcataacatcatatacgtaagtatagttcctcaaagtgactgacatttattttaattttgctttgtttttttttattttctcccccattcctttattttgtgttattcctgactcacttgacactctctgatgcctgagagattcctgtttgggatttaatatccagggctgtgtttacagtaaaaaaagcaggcagtcccttttagtttttccttttt

SEQ ID NO: 1766 - DNA, 389 bp, Homo sapiens
aaaaacaaagtcttcaacttgggtgttgagattggcaaaaggggaagcaagggaaaagccaaggaaagataaaatattcagaagaaagtcaaagttatctgcaattacatgttagaacagattttgcaggttaaaaagatgttgcttaaatatattcataaacctgttgtaagattttcacttatgcagtttcagaaaatttagctgcttaacatatgacagaactgtattttaacaaatgacattaaaagtcaggagagctactcagttaattgataaagtagaggcaacgtgggggagccctccccacgtttattgaagatttgtggctcccccagccccgtttgcctgcatcaggctaacaacctcattcctcccatagagcctgg

SEQ ID NO: 1767 - DNA, 176 bp, Homo sapiens
  misc_feature (1)...(176): n = A,T,C or G
tttttcaacgattaanaatnntcattacataactnggtgaaactgaaaaagtatatcatatgggtacacaaggctatttgccagcgtatattaatattttagaaaatattccttttgtnatactnaatatcancatagagcnagaatcatattatcatacttatnatantgttcan

SEQ ID NO: 1768 - DNA, 384 bp, Homo sapiens
aaaagaaatcatggtacttcttagagcaatttgcaaaaggggaaaaaagtcttaggctcactccttggaaataaatatcaagtaaccataaaaatattcagccatttttcagttattcggggagttcaggcatggtcccacgcagagcatcagagttcctctttgaaataacccagctttgccaatgacatctcttttctcaactgcataacctcccaaaacatctgatcaacatcctgctgtttcacaagtccctgctgaatgtatcgaatgtatgtaaaaaagttacatacagaagtgatcctgtatctgcaaaaaggagaaatacaataatagttgcttgagtcccctaatttaattctgtgtttacaggacttactctgg

SEQ ID NO: 1769 - DNA, 111 bp, Homo sapiens
  misc_feature (1)...(111): n = A,T,C or G
aaatataaaaaattaaaagttaaaactctagcccttcagtgaaggagacgtaaaatggcgtgggtaacaacaactaccaaaaaaaaaaaanaaaaaaaaaaaaaaaaaaaa

SEQ ID NO: 1770 - DNA, 225 bp, Homo sapiens
ctggctgaaggggccgtggagctcccgccagcccacgattagctgggccttcttcgggccaatgcgctgaagactgcggagatctcgggctgagccttcgttcagcagatccagtattttttggcgcccatgagccagtagctccgggctgatctgtagctcccagcagtcctcagccttctcctcaggctctagggcatccagggactccagctttctcttccg

SEQ ID NO: 1771 - DNA, 223 bp, Homo sapiens
  misc_feature (1)...(223): n = A,T,C or G
ggccaagtaaaagctttatttttttaaatgaaaactacnaaaggcggggtgggttgtggcgggggcaagttgtggccctgtaggaccttcggtgactgatgatctaagtttccggaggtttctcagagcctctctggttctttcaatcggggatgtctgagggaccttccgcggcatctatgcgggcatggttactgcctctggtgccccccgcagccgcgcg

SEQ ID NO: 1772 - DNA, 419 bp, Homo sapiens
ccaagtctacaatgtcccaatatcaaggacaaccaccctagcttcttagtgaagacaatgtacagttatccattagatcaagactacacggtctatgagcaataatgtgatttctggacattgcccatgtataatcctcactgatgatttcaagctaaagcaaaccaccttatacagagatctagaatctctttatgttctccagaggaaggtggaagaaaccatgggcaggagtaggaattgagtgataaacaattgggctaatgaagaaaacttctcttattgttcagttcatccagattataacttcaatgggacactttagaccattagacaattgacactggattaaacaaattcacataatgccaaatacacaatgtatttatagcaacgtataatttgcaaagatggacttt

SEQ ID NO: 1773 - DNA, 172 bp, Homo sapiens
  misc_feature (1)...(172): n = A,T,C or G
cgngcggctgcggggggcaccagaggcagtataccatgcccncatagatgccgcggaaggtccctnanacatccccnattgaaanaaccattagaggctctganaaacctacggaaacttagatcatcaggtcaccgaanagtcctacagggccacaacatgccccctgcac

SEQ ID NO: 1774 - DNA, 525 bp, Homo sapiens
ccttcactctcccctgaggctgtcctggcccggactgtggggagcacctccaccccccggagcaggtgcacacccaggtaagcaggtccaggggctggggtgggcagggctagcttttggatcctgagtgtcactactctctcctcccagggatgccctggacctaagtgacatcaactcagagcctcctcggggctccttcccctcctttgagcctcggaacctcctcagcctgtttgaggacaccctagacccaacctgagccccagactctgcctctgcacttttaaccttttatcctgtgtctctcccgtcgcccttgaaagctggggcccctcgggaactcccatggtcttctctgcctggccgtgtctaataaaaagtatttgaaccttgggagcacccaagcttgctcatgtggcaacatggcccttcctggtccctttattgatgtcatccagggtcttaacgcccctgaggctgagccctgctgcagaacccacgctcctggccttgggccagcag

SEQ ID NO: 1775 - DNA, 458 bp, Homo sapiens
aaattttctagtcaaattaataagcctttgtattatatgccatcctcctttggaatgatagcggtataattaaaatagaacatttttaacacagaatacttattggtgaagtggtctcttatgtagtcttcttttgacgagaacgttgagattttcgaactttcagaactttctttttttgatgttttttcccattcttttgctttttcttttggctgacctgtttctcccactttttaatcagttccttcacatctgctgaatctgggtttagacatgtttgaactccattcttcagtgtagcaatgatttcaattttctcgcaggaagggcttggggcaaattgtttaaggtctttcaaggattgtaggtggatagtcccttggttggtgctgatgcaggaacagcgaccctttctcactactggggttccttgcactccaatcagaaccagcaag

SEQ ID NO: 1776 - DNA, 461 bp, Homo sapiens
aaagtttcacttccctagcaaaatatcttcagtcaagaaattagtctttgaaaattatgaaaattgttgtgggaaatatttatacaaattattactgataatgcacatatattttgaaacattgtttctagaagcaataaaatataacctatttaggagataacccaaatgatttgtaaaaaaattaacttgtagaaaagggaaggatgttgtgtaaaatcaagtcaattatttgaggtttttataatattgagtacttatgtactaagtcacacccagccagtcaataactgagaaatcaaaataaaataataatttcaaagaattacataaatacagggccttttgagatttttggcaattgtaaacaaaaacgaatggtttttacaattcagtgtaattctacgaatatttatttggcacccatgttaggcactgaggctacacagcagtgaaatagg

SEQ ID NO: 1777 - DNA, 368 bp, Homo sapiens
ccaagttctgctggaggagcactcaagtgtgacgagcagggccactggaccctgcagggctgtggtgtatatagtgcagctttggaggtggaactctattttcacacttttctatggagccttccgagtcccaggttttcacttgaggctgtctgtctggatggcggttttcagacctccattaacatccctacccagcattctgtacttcgggggccttctctcttgttataaaactttttaccaagtgaaacatcgataccacctttgtttccattctcactggtgtaaatactgagtactaactgagaattttgactttgcattctgtcggaatacttgtgttcaataaaaattgaaagaaaaaa

SEQ ID NO: 1778 - DNA, 554 bp, Homo sapiens
  misc_feature (1)...(554): n = A,T,C or G
cagttatgcgaaaacatggctgcggccggtttggcccttctttgtaggagagtttcatccgccctgaaatcttcccgatcgttaataactcctcaggtccctgcctgcacagggttttttcttagtttgttgcctaagagtacaccaaatgtgacatcctttcaccaatatagattacttcataccacattgtcaaggaaaggactagaanaattttttgatgacccaaaaaactgggggcaagaaaaagtaaaatctggagcagcatggacctgtcagcaactaaggaacaaaagtaatgaagatttacacaaactttggtatgtcttactgaaagaaagaaacatgcttctaaccctagagcaggaggccaagcggcagagattgccaatgccaagtccagagcggttagatanggtagtagattccatggatgcattagataaagtggtccagggaaagagaagatgccctaaggcttcttcagactggtcaaganagagctagacctggtgctntggagaaagaagacatctttggaaagaatcatctgg

SEQ ID NO: 1779 - DNA, 379 bp, Homo sapiens
  misc_feature (1)...(379): n = A,T,C or G
gtcttggctgggcatgacaaccgcgtcagctgcctgggcgtnactgacgatggcatggctgtggcgacagggtcctgggatagcttcctcaagatctggaactaacgccagtagcatgtggatgccatggagactggaagaccattccaacttggacgcgttaccatgagagcatatcctatccaaccgtactaacgtggacaccctacacctcccctcagaacttcaaaagggcaagatcttttttccttcacttattgctgagaccaagagcacaattcccattgagagaaagatctctgtgctgtaaactaaaacaaattgtgcattccttccggggccatcgtctttgtcttcttttttgtcttgaatgaattnt

SEQ ID NO: 1780 - DNA, 222 bp, Homo sapiens
ctggtaattgcagaatccactttgcctgtgtaagtgaaaaatatagactgttatcttgttggccctatgaaattctgcacttttcattatatactctaccttcattaattacttctggcaagatgttctgccttagcactcagttgcattcttttcctttttcttcctgttcattatgctttaattctgaggaccatatgagggtagaatatattatctttt

SEQ ID NO: 1781 - DNA, 292 bp, Homo sapiens
ctgctggagcaagccctgcggaagcacaacgtggctgagccgtgttccatcaaagtccttgacaaggctacggtaccaataataaagctcacagatcaggagactgaagtgaaagttgacatcagctttaacatggagacgggcgtccgggcagcggagttcatcaagaattacatgaagaaatattcattgctgccttacttgattttagtattgaaacagttccttctgcagagggacctgaatgaagtttttacaggtggaattagctcatacagcctaattttaatgg

SEQ ID NO: 1782 - DNA, 381 bp, Homo sapiens
  misc_feature (1)...(381): n = A,T,C or G
aaaacctggacctttctggaagggcagcatataaaaacatcagtcccgaggaggggacaacaatactacctcactactacatctgtgatgactggttgttcaaacacaatggagtgtgtaaggtatatgttntataattcataaccatagcctcgatcatcaagaaatactttcgaaatttcattttccttcagaatatcttaagagtgctaaatttttaactgcctttttgtcgagtcaaactgtgggattctgatttgtattaaaattgtaagctcctcactggtatactatcatcctggaggggtgttgtatggctgagcaagagagagagagaatgagagagagactgtgtgtgtgtgtgtgtgtgtgtgtgtgcac

SEQ ID NO: 1783 - DNA, 127 bp, Homo sapiens
aaatatctatgtcacagcaaacaggtggcaattcaacatccagggtcgacagaatgcttgaaggagactgcaacagattggattcccatggtggagagggcatcttcacaggtgaaggggggcccag

SEQ ID NO: 1784 - DNA, 259 bp, Homo sapiens
agcccaatgttcctgttggtatagactatgtgatacctaaaacagggttttactgtaagctgtgttcactcttttatacaaatgaagaagttgcaaagaatactcattgcagcagccttcctcattatcagaaattaaagaaatttctgaataaattggcagaagaacgcagacagaagaaggaaacttaagatgtgcaaggagatttaatgatttcaaagaaaataatggttctttgtttttaatgttaacctttttt

SEQ ID NO: 1785 - DNA, 400 bp, Homo sapiens
ctggtacttgacagagaggatggcgctgtcgaccatagtctcccagaggaagcagataaagcggaaggctccccgtggctttctaaagcgagtcttcaagcgaaagaagcctcaacttcgtctggagaaaagtggtgacttattggtccatctgaactgtttactgtttgttcatcgattagcagaagagtccaggacaaacgcttgtgcgagtaaatgtagagtcattaacaaggagcatgtactggccgcagcaaaggtaattctaaagaagagcagaggttagaagtcaaagaacatattcttgaaagttatgatgcattcttttgggtggtaacagatcataaagacattttttacacatcagttaatatgggattattaaatattggctataaaa

SEQ ID NO: 1786 - DNA, 372 bp, Homo sapiens
  misc_feature (1)...(372): n = A,T,C or G
aaatgttctcatcagtttcttgccatgttgttaactatacaacctggctaaagatgaatatttttctactggtattttaatttttgacctaaatgtttaagcattcggaatgagaaaactatacagatttgagaaatgatgctaaatttatagttttcagtaacttaaaaagctaacatgagagcatgccaaaatttgctaagtcttacaaagatcaagggctgtccgcaacagggaanaacagttttgaaaatttatgaactatcttatttttaggtaggttttgaaagctttttgtctaagtgaattcttatgccttggtcagagtaataactgaaggagttgcttatcttggctttcgagtctgagttt

SEQ ID NO: 1787 - DNA, 86 bp, Homo sapiens
  misc_feature (1)...(86): n = A,T,C or G
atgatgattactttcacatcgnaatccaacctgaagagtactttgttctccaatgttgctgtcaacattcagccatttatccttat

SEQ ID NO: 1788 - DNA, 354 bp, Homo sapiens
ccttgaaaatccgcctgcaagcctaccacactcaaaccaccccactcatagagtactacaggaaacgggggatccactccgccatcgatgcatcccagacccccgatgtcgtgttcgcaagcatcctagcagccttctccaaagccacatcctagtatcagaaggccaggcgagactgcaacactgctcatcaccccgcggcgtgatccctgctcttaggtgctgggcagaggggaagggtggtcagggtgaggatggtgagggagggctggtgaggggctcagaggaatacttggaacaacagcagtgttattgtagtgtggcagtttcttttatacataggtgagagttttt

SEQ ID NO: 1789 - DNA, 651 bp, Homo sapiens
taaagggcttcttgcttttttgaatacaaaacatgatctattgtaataaaaaggtaagacattgattttacaaaattatatttccaaatacagataaaaaaatcttgaacagttaattcagattttattgatctaaaatgtgcaaaatatctgataatacttaagtttattaaattcattgtacataggctgatatcatcccatacaaaaaaatgctcagtatcttgttaagattcaaaatagtgtttaattatctgagcttaagatttattgaactactatccaaataacaacaaaagtccatattgtaaaagaaaaaagtaaaactaaaaattttctgattattaattgacttgaaattcattcccattaaaacataaaactatagccaatatccatttgaaaagtgaagaaaaactggaagtccccatgataaatacaccaattccaaataaaaaattaaaatcaaattttgctattcaaaacacacatgatcttttaagttattcaggtttaatagatttactaaggatagagttcatagagcatgtatttggtacttctgtttagactcaggttttgcaaagtccccaagagaaggtgagaaggtaaaataaacataaaattgggatccttctctcccaccacacc

SEQ ID NO: 1790 - DNA, 388 bp, Homo sapiens
aaatcatgtttaacacagtgtacacaagtcagtccaacagttagtgttaattactaataatatatgaaaaccctgccaacacaattgctgctacatcaccaatataattattaaccactgtcggaaaaacacacataaattcaggtaagactaaaagctgtctcacaaaaagaaaaaagaaatccaatggatccactaatgctatcaaaagggacatgcaggaatgtaacatgacatttttagaaatgtgtgtttctaaaaagaaaaaaaaatacactaaaatgccagtggactataattcattcaaaacatctttagtgttccttcccaaagatcttgatctgctcagtaattgcttcacaagatctatcacagccatcttttggag

SEQ ID NO: 1791 - DNA, 2442 bp, Homo sapiens
cgggagcttgaaggacacaagaatgggaggaaaggcggactctcaggaacttcattcttcacgtggtttatggtgattgcattgctgggcgtctggacatctgtagctgtcgtttggtttgatcttgttgactatgaggaagttctaggaaaactaggaatctatgatgctgatggtgatggagattttgatgtggatgatgccaaagttttattaggacttaaagagagatctacttcagagccagcagtcccgccagaagaggctgagccacacactgagcccgaggagcaggttcctgtggaggcagaaccccagaatatcgaagatgaagcaaaagaacaaattcagtcccttctccatgaaatggtacacgcagaacatgttgagggagaagacttgcaacaagaagatggacccacaggagaaccacaacaagaggatgatgagtttcttatggcgactgatgtagatgatagatttgagaccctggaacttgaagtatctcatgaagaaaccgagcatagttaccacgtggaagagacagtttcacaagactgtaatcaggatatggaagagatgatgtctgagcaggaaaatccagattccagtgaaccagtagtagaagatgaaagattgcaccatgatacagatgatgtaacataccaagtctatgaggaacaagcagtatatgaacctctagaaaatgaagggatagaaatcacagaagtaactgtcccccctgaggataatcctgtagaagattcacaggtaattgtagaagaagtaagcatttttcctgtggaagaacagcaggaagtaccaccagatacttaaagcttcaaaaagactgcccctaccaccacaggaggaccagcctaaccatacgctccaaaagatggctgtgatagatcttgtgaagcaattactgagcagatcaagatctttgggaaggaacactaaagatgttttgaatgaattatagtccactggcattttagtgtatttttttttctttttagaaacacacatttctaaaaatgtcatgttacattcctgcatgtcccttttgatagcattagtggatccattggatttcttttttctttttgtgagacagcttttagtcttacctgaatttatgtgtgtttttccgacagtggttaataattatattggtgatgtagcagcaattgtgttggcagggttttcatatattattagtaattaacactaactgttggactgacttgtgtacactgtgttaaacatgatttaaaagctattaagagtactttgtgttagcactcttaaaaacgctaacagagatcatcattagctgtgaagatttgagttgtatatacctgcactgatattcttatcaaaaatttctacattagctttaagtgttcagattaacacttttgaaacctttgtagcttttagctgattaattagaaaaattaatatttcagtgaaagttttaaattatcatttatttatttttttaaatgagaggggaaagctgaaattccttgttaagacacaaggaaaaagaatggccctactattatcatgcaaaaatgctttgttggcacctcagattaatcatataatagctatagtctcttcagcatttgtttaaattttagaaaacctgtataaattactggtgcataacttaaagattattctgcctttggctaattgagtaattcccctccagcactagagaccgctcagtgctcttactagatgaactcagtaacgccttgagctgggttgattgaggatgtgtgaaaaagctcacagagcccgatgcctgctgctatttcacggcaatgagcctttttctttctacactgaagattttcttcttatttaatgtggtttattttgggctcagaaataattgctctgttgaaaataatcctttgtcagaaaagaaggtagctaccacatcattttgaaaggaccatgagcaactataagcaaagccataagaagtggtttgatcgatatattaggggtagctcttgattttgttaacattaagataaggtgactttttccccctgcttttaggattaaaatcaaagatacttctatatttttatcactatagatcatagttattatacaatgtagtgagtcctgcatgggtactcgatgtgtaatgaaacctgaaataataataagataataagaaaagcaataattttctaaagctgtgctgtcggtgatacagagatgatactcaaattataataaaactcttcattttgtgaattatagaagctactttttataaagccatatttttttagggaaactaaggagtgacatagaactgatgaatgagtaaaagtaagttttgctggatttttgtagaactctggacgttgaggattcattatgctgtggttaactttaaatattttt

SEQ ID NO: 1792 - DNA, 2279 bp, Homo sapiens
cccagctaatcttttatcttctcaccgaagcttagtacagcgggttgaaacaatttctctaggtgagcacccctgtgacagaggagaacaagtaactctcttcctcttcaatgattgcctagagatagcaagaaaacggcacaaggttattggcacttttaggagtcctcatggccaaacccgacccccagcttctcttaagcatattcacctaatgcctctttctcagattaagaaggtattggacataagagagacagaagattgccataatgcttttgccttgcttgtgaggccaccaacagagcaggcaaatgtgctactcagtttccagatgacatcagatgaacttccaaaagaaaactggctaaagatgctgtgtcgacatgtagctaacaccatttgtaaagcagatgctgagaatcttatttatactgctgatccagaatcctttgaagtaaatacaaaagatatggacagtacattgagtagagcatcaagagcaataaaaaagacttcaaaaaaggttacaagagcattctctttctccaaaactccaaaaagagctcttcgaagggctcttatgacatcccacggctcagtggagggaagaagtccttccagcaatgataagcatgtaatgagtcgtctttctagcacatcatcattagcaattacccattctgtttccacaagcaatgtaattggatttactaagcatgtttatgttcagcgcctaaactctactggtgggcgctctcagtactcctggtttcaatctgtacgtcattctgctttccgagctagtttttcagagatactagaaggaaatactgatttttcaaatttcaaaaaagttctttccaagtcatctttgacatttgtgaagaattaggagatttgccaaccactaatggaaacaagcctcatgaagtttaatggtatcccttctccctcccttgtcagccttccttccttctttgaaaggagaagtcatacgttaagtagatctacaactcatttgatatgaagcgttaccaaaatcttaaattatagaaatgtatagacacctcatactcaaataagaaactgacttaaatggtacttgtaattagcacttggtgaaagctggaaggaagataaataacactaaactatgctatttgatttttcttcttgaaagagtaaggtttacctgttacattttcaagttaattcatgtaaaaaatgatagtgattttgatgtaatttatctcttgtttgaatctgtcattcaaaggccaataatttaagttgctatcagctgatattagtagctttgcaaccctgatagagtaaataaattttatgggcgggtgccaaatactgctgtgaatctatttgtatagtatccatgaatgaatttatggaaatagatatttgtgcagctcaatttatgcagagattaaatgacatcataatactggatgaaaacttgcatagaattctgattaaatagtgggtctgtttcacatgtgcagtttgaagtatttaaataaccactcctttcacagtttattttcttctcaagcgttttcaagatctagcatgtggattttaaaagatttgccctcattaacaagaataacatttaaaggagattgtttcaaaatatttttgcaaattgagataaggacagaaagattgagaaacattgtatattttgcaaaaacaagatgtttgtagctgtttcagagagagtacggtatatttatggtaattttatccactagcaaatcttgatttagtttgatagtgtgtggaattttattttgaaggataagaccatgggaaaattgtggtaaagactgtttgtacccttcatgaaataattctgaagttgccatcagttttactaatcttctgtgaaatgcatagatatgcgcatgttcaactttttattgtggtcttataattaaatgtaaaattgaaaattcatttgctgtttcaaagtgtgatatctttcacaatagcctttttatagtcagtaattcagaataatcaagttcatatggataaatgcatttttatttcctatttctttagggagtgctacaaatgtttgtcacttaaatttcaagtttctgttttaatagttaactgactatagattgttttctatgccatgtatgtgccacttctgagagtagtaaatgactctttgctacattttaaaagcaattgtattagtaagaactttgtaaataaatacctaaaacccaagtgttaaaaaaaaaaaa

SEQ ID NO: 1793 - DNA, 1904 bp, Homo sapiens
gggaatttgaattggaatttacttccagctgcactcatgcaagaatttgtgatgtatactaaaaaataaaaaaaggctcattcaggagagccttgtactcagcaagagtggctaacattagagcatacagactatgtgattgtataaggcatggagagttaaacaacctccagtcagctgcctgtttgaataccactgacttgttaagaatgatcttgcttttagattttaccatattcaaacttattaggtgagccttatatagcatatatacctggctgctattgtggggtttgggaacatgaggggtggggtgaactgttgttgttttaggtttcagtcagacagacatccctgtgcctcagttcccagaagcacagcaggcctctaggagcatccgtgggaacggcgcagtcctgacatcaccaactctcctgctcaggctcatcccatatacagaggtcaaagggtggggtttgatatcgggggaaggaatgagaaagtagaagcaatgtcacttcagtgccactgttgactagtctttggtgcttatgtcagtatttgttttatttcctgatttttttaaagttggcaaaactacatatttttatcttgatgaaggcagtgggagggtggaacaaaaacaagccattactgctatttctagttcatttactggagactgtcccttaatagctaatgtagaataaatttgaaacatagacctagatgacaaaaagaatgggaatagaaatgaatctcaggatttgaacaaacagaagacgtttatgctgtgttgatgcccagttctacaactgctattacatttgtcattctgtctccccttttcccctaattcttttatgtatgtatgtatacagtttgaggaaatgtgcatctatggtcagtcctttttaaaagacttaatgaatttattactcttttgcaaaaaatatacccactgcttatatgggcatacaaatgctaccctattttaaatgtaggtggcgtatgtgttcgtgttttaatgtattcagagccattgggcaataagcagtccagaacattgaaaactcaagcaggtaaagcacctaacacccttagtttctagaattactttaaaaaacttttatattgctgcatcttccacagttctttgggtagtctctgaacttaaaatttgtaggagttgtagactacctaaatttttaagttatggtatttgttcataggttgtaggggtaggtaaagaaggaaacagacaagaaaatggcttcttgaggtggcagctgctgagtggctaaatcttaccactttctttctactttttttggaaattttcccagcttagcatgaacatggatcatacagtgtttgattttatgtgattgagatttttgttttttatttttggagggaaggtcttggagaaacattaaaaagttggtgtatgtgcaaaaatacgaaatgttaaacaaaggaattttttcttatttaatctgaatggtaagcaagaactttttctatatacccttctgctgcagcagacaactaaactggtaggtggcagcagaggaaggaattcttcagattgatggctactgacttaaagtctgcataggagaagagatagagcatgacataccaagtgaagcaagggggacaaaaatggaaacaggactaagattcctgcattttgactctaaatggttcttttgaagtaaccagtgatcttttttgcttaccctcatcaacagaatggatgaagatagatttgactgtgtgctttttcaagtggagaatatgaatatacagaacaagaaagcaataactccaacctgtttgattccgtctgttttctaaataaagacactatgcgctggaaataaaaaaaaaaaaaaaaa

SEQ ID NO: 1794 - DNA, 2881 bp, Homo sapiens
acagaagtgctagaagccagtgctcgtgaactaaggagaaaaagaacagacaagggaacagcctggacatggcatcagagatccacatgacaggcccaatgtgcctcattgagaacactaatgggcgactgatggcgaatccagaagctctgaagatcctttctgccattacacagcctatggtggtggtggcaattgtgggcctctaccgcacaggcaaatcctacctgatgaacaagctggctggaaagaaaaagggcttctctctgggctccacggtgcagtctcacactaaaggaatctggatgtggtgtgtgccccaccccaagaagccaggccacatcctagttctgctggacaccgagggtctgggagatgtagagaagggtgacaaccagaatgactcctggatcttcgccctggccgtcctcctgagcagcaccttcgtgtacaatagcataggaaccatcaaccagcaggctatggaccaactgtactatgtgacagagctgacacatagaatccgatcaaaatcctcacctgatgagaatgagaatgaggttgaggattcagctgactttgtgagcttcttcccagactttgtgtggacactgagagatttctccctggacttggaagcagatggacaacccctcacaccagatgagtacctgacatactccctgaagctgaagaaaggtaccagtcaaaaagatgaaacttttaacctgcccagactctgtatccggaaattcttcccaaagaaaaaatgctttgtctttgatcggcccgttcaccgcaggaagcttgcccagctcgagaaactacaagatgaagagctggaccccgaatttgtgcaacaagtagcagacttctgttcctacatctttagtaattccaaaactaaaactctttcaggaggcatccaggtcaacgggcctcgtctagagagcctggtgctgacctacgtcaatgccatcagcagtggggatctgccgtgcatggagaacgcagtcctggccttggcccagatagagaactcagctgcagtgcaaaaggctattgcccactatgaacagcagatgggccagaaggtgcagctgcccacagaaagcctccaggagctgctggacctgcacagggacagtgagagagaggccattgaagtcttcatcaggagttccttcaaagatgtggaccatctatttcaaaaggagttagcggcccagctagaaaaaaagcgggatgacttttgtaaacagaatcaggaagcatcatcagatcgttgctcaggtttacttcaggtcattttcagtcctctagaagaagaagtgaaggcgggaatttattcgaaaccagggggctatcgtctctttgttcagaagctacaagacctgaagaaaaagtactatgaggaaccgaggaaggggatacaggctgaagagattctgcagacatacttgaaatccaaggagtctatgactgatgcaattctccagacagaccagactctcacagaaaaagaaaaggagattgaagtggaacgtgtgaaagctgagtctgcacaggcttcagcaaaaatgttgcaggaaatgcaaagaaagaatgagcagatgatggaacagaaggagaggagttatcaggaacacttgaaacaactgactgagaagatggagaacgacagggtccagttgctgaaagagcaagagaggaccctcgctcttaaacttcaggaacaggagcaactactaaaagagggatttcaaaaagaaagcagaataatgaaaaatgagatacaggatctccagacgaaaatgagacgacgaaaggcatgtaccataagctaaagaccagagccttcctgtcacccctaaccaaggcataattgaaacaattttagaatttggaacaagcgtcactacatttgataataattagatcttgcatcataacaccaaaagtttataaaggcatgtggtacaatgatcaaaatcatgttttttcttaaaaaaaaaaaaaagactgtaaattgtgcaacaaagatgcatttacctctgtatcaactcaggaaatctcataagctggtaccactcaggagaagtttattcttccagatgaccagcagtagacaaatggatactgagcagagtcttaggtaaaagtcttgggaaatatttgggcattggtctggccaagtctacaatgtcccaatatcaaggacaaccaccctagcttcttagtgaagacaatgtacagttatccattagatcaagactacacggtctatgagcaataatgtgatttctggacattgcccatgtataatcctcactgatgatttcaagctaaagcaaaccaccttatacagagatctagaatctctttatgttctccagaggaaggtggaagaaaccatgggcaggagtaggaattgagtgataaacaattgggctaatgaagaaaacttctcttattgttcagttcatccagattataacttcaatgggacactttagaccattagacaattgacactggattaaacaaattcacataatgccaaatacacaatgtatttatagcaacgtataatttgcaaagatggactttaaaagatgctgtgtaactaaactgaaataattcaattacttattatttagaatgttaaagcttatgatagtcttttctaattcttaacactcatacttgaaatctttccgagtttccccagaagagaatatgggattttttttgacatttttgacccatttaataatgctcttgtgtttacctagtatatgtagactttgtcttatgtgtcaaaagtcctaggaaagtggttgatgtttcttatagcaattaaaaattatttttgaactga

SEQ ID NO: 1795 - DNA, 422 bp, Homo sapiens
  misc_feature (1)...(422): n = A,T,C or G
gttttaaagcctctggacagagcagtatttcgtttaaaactttgtttttcttaaaagcttacagtgtttggctaattctcctcccctttttacaagacgggggccggagggtggacactggtggcaggttaagggatactgtcactttaagaagcctgcagattgaagtgtaaacatggagaaattaggggctgattttttaaactgtgtgagatattaaccagccgccctgttataaaatcaggaaatccaaacagcgatttacaccgattaacaccccctttatatatttttnacaaaaatacactgagaaaataatcaaacgttttcatctctcttgtctttttttgttttttaaaagtgtcaaaagtctacatntaaatataaaanattaaaagttaaactctagcccttcagtgagg

SEQ ID NO: 1796 - DNA, 797 bp, Homo sapiens
agtctctgctcttcccagcctctccggcgcgctccaagggcttcccgtcgggaccatgcgcggcagtgagctcccgctggtcctgctggcgctggtcctctgcctagcgccccgggggcgagcggtcccgctgcctgcgggcggagggaccgtgctgaccaagatgtacccgcgcggcaaccactgggcggtggggcacttaatggggaaaaagagcacaggggagtcttcttctgtttctgagagagggagcctgaagcagcagctgagagagtacatcaggtgggaagaagctgcaaggaatttgctgggtctcatagaagcaaaggagaacagaaaccaccagccacctcaacccaaggccttgggcaatcagcagccttcgtgggattcagaggatagcagcaacttcaaagatgtaggttcaaaaggcaaagttggtagactctctgctccaggttctcaacgtgaaggaaggaacccccagctgaaccagcaatgataatgatggcctctctcaaaagagaaaaacaaaacccctaagagactgagttctgcaagcatcagttctacggatcatcaacaagatttccttgtgcaaaatatttgactattctgtatctttcatccttgactaaattcgtgattttcaagcagcatcttctggtttaaacttgtttgctgtgaacaattgtcgaaaagagtcttccaattaatgcttttttatatctaggctacctgttggttagattcaaggccccgagctgttaccattcacaataaaagcttaaacacat

SEQ ID NO: 1797 - DNA, 4600 bp, Homo sapiens
aatcaactgcttcagggaaaaagaaaaaaaaaaaaaaaagacttgcctgggaggccgcgagaaacttgcattggaagcttcagcaaccagcattcgagaaactcctctctactttagcacggtctccagactcagccgagagacagcaaactgcagcgcggtgagagagcgagagagagggagagagagactctccagcctgggaactataactcctctgcgagaggcggagaactccttccccaaatcttttggggacttttctctctttacccacctccgcccctgcgaggagttgaggggccagttcggccgccgcgcgcgtcttcccgttcggcgtgtgcttggcccggggaaccgggagggcccggcgatcgcgcggcggccgccgcgagggtgtgagcgcgcgtgggcgcccgccgagccgaggccatggtgcagcaaaccaacaatgccgagaacacggaagcgctgctggccggcgagagctcggactcgggcgccggcctcgagctgggaatcgcctcctcccccacgcccggctccaccgcctccacgggcggcaaggccgacgacccgagctggtgcaagaccccgagtgggcacatcaagcgacccatgaacgccttcatggtgtggtcgcagatcgagcggcgcaagatcatggagcagtcgcccgacatgcacaacgccgagatctccaagcggctgggcaaacgctggaagctgctcaaagacagcgacaagatccctttcattcgagaggcggagcggctgcgcctcaagcacatggctgactaccccgactacaagtaccggcccaggaagaaggtgaagtccggcaacgccaactccagctcctcggccgccgcctcctccaagccgggggagaagggagacaaggtcggtggcagtggcgggggcggccatgggggcggcggcggcggcgggagcagcaacgcggggggaggaggcggcggtgcgagtggcggcggcgccaactccaaaccggcgcagaaaaagagctgcggctccaaagtggcgggcggcgcgggcggtggggttagcaaaccgcacgccaagctcatcctggcaggcggcggcggcggcgggaaagcagcggctgccgccgccgcctccttcgccgccgaacaggcgggggccgccgccctgctgcccctgggcgccgccgccgaccaccactcgctgtacaaggcgcggactcccagcgcctcggcctccgcctcctcggcagcctcggcctccgcagcgctcgcggccccgggcaagcacctggcggagaagaaggtgaagcgcgtctacctgttcggcggcctgggcacgtcgtcgtcgcccgtgggcggcgtgggcgcgggagccgaccccagcgaccccctgggcctgtacgaggaggagggcgcgggctgctcgcccgacgcgcccagcctgagcggccgcagcagcgccgcctcgtcccccgccgccggccgctcgcccgccgaccaccgcggctacgccagcctgcgcgccgcctcgcccgccccgtccagcgcgccctcgcacgcgtcctcctcggcctcgtcccactcctcctcttcctcctcctcgggctcctcgtcctccgacgacgagttcgaagacgacctgctcgacctgaaccccagctcaaactttgagagcatgtccctgggcagcttcagttcgtcgtcggcgctcgaccgggacctggattttaacttcgagcccggctccggctcgcacttcgagttcccggactactgcacgcccgaggtgagcgagatgatctcgggagactggctcgagtccagcatctccaacctggttttcacctactgaagggcgcgcaggcagggagaagggccggggggggtaggagaggagaaaaaaaaagtgaaaaaaagaaacgaaaaggacagacgaagagtttaaagagaaaagggaaaaaagaaagaaaaagtaagcagggctggcttcgcccgcgttctcgtcgtcggatcaaggagcgcggcggcgttttggacccgcgctcccatcccccaccttcccgggccggggacccactctgcccagccggagggacgcggaggaggaagagggtagacaggggcgacctgtgattgttgttattgatgttgttgttgatggcaaaaaaaaaaaagcgacttcgagtttgctcccctttgcttgaagagaccccctcccccttccaacgagcttccggacttgtctgcacccccagcaagaaggcgagttagttttctagagacttgaaggagtctcccccttcctgcatcaccaccttggttttgttttattttgcttcttggtcaagaaaggaggggagaacccagcgcacccctccccccctttttttaaacgcgtgatgaagacagaaggctccggggtgacgaatttggccgatggcagatgttttgggggaacgccgggactgagagactccacgcaggcgaattcccgtttggggcttttttttcctccctcttttccccttgccccctctgcagccggaggaggagatgttgaggggaggaggccagccagtgtgaccggcgctaggaaatgacccgagaaccccgttggaagcgcagcagcgggagctaggggcgggggcggaggaggacacgaactggaagggggttcacggtcaaactgaaatggatttgcacgttggggagctggcggcggcggctgctgggcctccgccttcttttctacgtgaaatcagtgaggtgagacttcccagaccccggaggcgtggaggagaggagactgtttgatgtggtacaggggcagtcagtggagggcgagtggtttcggaaaaaaaaaaagaaaaaaagaaaaaaaaagaaaaaaaaaagatttttttcttctcttaatcggaatcgtgatggtgttggattatttcaatggtggggttaatatagcatgttatcctgtctatcttttaaagatttctgtataagactgttgagcagtttttaaaatagtgtaggataatataaaaagcagatagatggcgctatgtttgattcctacaacgaaattatcaccagctttttttcattcttaactctttaaaggattcaaacgcaactcaaatctgtgctggactttaaaaaaacaattcaggaccaaattttttctcagtgtgtgtgtttattccttataggtgtaaatgagaagacgtgtttttttccttcaccgatgctccatcctcgtatttctttttccttgtaaatgtaatcagatgccattttatatgtggacgtatttatactggccaaacatattttttcttttgtccctttttttctttcctttctttttacttcctttatttctttattccttccttttcctttttttcttttttttttctttttttttttttttttttggtagttgttgttacccacgccattttacgtctccttcactgaagggctagagttttaacttttaattttttatatttaaatgtagacttttgacacttttaaaaaacaaaaaaagacaagagagatgaaaacgtttgattattttctcagtgtatttttgtaaaaaatatataaagggggtgttaatcggtgtaaatcgctgtttggatttcctgattttataacagggcggctggttaatatctcacacagtttaaaaaatcagcccctaatttctccatgtttacacttcaatctgcaggcttcttaaagtgacagtatcccttaacctgccaccagtgtccaccctccggcccccgtcttgtaaaaaggggaggagaattagccaaacactgtaagcttttaagaaaaacaaagttttaaacgaaatactgctctgtccagaggctttaaaactggtgcaattacagcaaaaagggattctgtagctttaacttgtaaaccacatcttttttgcactttttttataagcaaaaacgtgccgtttaaaccactggatctatctaaatgccgatttgagttcgcgacactatgtactgcgtttttcattcttgtatttgactatttaatcctttctacttgtcgctaaatataattgttttagtcttatggcatgatgatagcatatgtgttcaggtttatagctgttgtgtttaaaaattgaaaaaagtggaaaacatctttgtacatttaagtctgtattataataagcaaaaagattgtgtgtatgtatgtttaatataacatgacaggcactaggacgtctgcctttttaaggcagttccgttaagggtttttgtttttaaacttttttttgccatccatcctgtgcaatatgccgtgtagaatatttgtcttaaaattcaaggccacaaaaacaatgtttgggggaaaaaaaagaaaaaatcatgccagctaatcatgtcaagttcactgcctgtcagattgttgatatataccttctgtaaataactttttttgagaaggaaataaaatcagctggaactgaaccctaaatcttgacttttgtcgttattatgcccaatgcctaagattggaaaggccctacagtatctggacactacacaatctgccttagc

SEQ ID NO: 1798 - DNA, 1635 bp, Homo sapiens
cccgagacccggcgcaagagagcgcagccttagtaggagaggaacgcgagacgcggcagagcgcgttcagcactgacttttgctgctgcttctgcttttttttttcttagaaacaagaaggcgccagcggcagcctcacacgcgagcgccacgcgaggctcccgaagccaacccgcgaagggaggaggggagggaggaggaggcggcgtgcagggaggagaaaaagcattttcaccttttttgctcccactctaagaagtctcccggggattttgtatatattttttaacttccgtcagggctcccgcttcatatttccttttctttccctctctgttcctgcacccaagttctctctgtgtccccctcgcgggccccgcacctcgcgtcccggatcgctctgattccgcgactccttggccgccgctgcgcatggaaagctctgccaagatggagagcggcggcgccggccagcagccccagccgcagccccagcagcccttcctgccgcccgcagcctgtttctttgccacggccgcagccgcggcggccgcagccgccgcagcggcagcgcagagcgcgcagcagcagcagcagcagcagcagcagcagcagcagcagcaggcgccgcagctgagaccggcggccgacggccagccctcagggggcggtcacaagtcagcgcccaagcaagtcaagcgacagcgctcgtcttcgcccgaactgatgcgctgcaaacgccggctcaacttcagcggctttggctacagcctgccgcagcagcagccggccgccgtggcgcgccgcaacgagcgcgagcgcaaccgcgtcaagttggtcaacctgggctttgccacccttcgggagcacgtccccaacggcgcggccaacaagaagatgagtaaggtggagacactgcgctcggcggtcgagtacatccgcgcgctgcagcagctgctggacgagcatgacgcggtgagcgccgccttccaggcaggcgtcctgtcgcccaccatctcccccaactactccaacgacttgaactccatggccggctcgccggtctcatcctactcgtcggacgagggctcttacgacccgctcagccccgaggagcaggagcttctcgacttcaccaactggttctgaggggctcggcctggtcaggccctggtgcgaatggactttggaagcagggtgatcgcacaacctgcatctttagtgctttcttgtcagtggcgttgggagggggagaaaaggaaaagaaaaaaaaagaagaagaagaagaaaagagaagaagaaaaaaacgaaaacagtcaaccaaccccatcgccaactaagcgaggcatgcctgagagacatggctttcagaaaacgggaagcgctcagaacagtatctttgcactccaatcattcacggagatatgaagagcaactgggacctgagtcaatgcgcaaaatgcagcttgtgtgcaaaagcagtgggctcctggcagaagggagcagcacacgcgttatagtaactcccatcacctctaacacgcacagctgaaagttcttgctcgggtcccttcacctccccgccctttcttagagtgcagttcttagccctctagaaacgagttggtgtctttc

SEQ ID NO: 1799 - DNA, 2036 bp, Homo sapiens
tttcctctttctctaagagtctctctctccctttccctctctctccccccaatctgtctttctagcatgttgccctttttcaaccacatttgtgtttcaggtgtagagaggagagagagtgaacagggagcggggcttttgtctgttggtctccctggactgaagagagggagaatagaagcccaagactaagattctcaaaatggtttattacccagaactctttgtctgggtcagtcaagaaccatttccaaacaaggacatggagggaaggcttcctaagggaagacttcctgtcccaaaggaagtgaaccgcaagaagaacgatgagacaaacgctgcctccctgactccactgggcagcagtgaactccgctccccaagaatcagttacctccactttttttaatcgtaacacctccatttgtattacatatggtgtatgggtattgatgaggtcatggtatcatatatgggatttttttctgtgtaaatcatcaagtataagaagaaactatgggactctgagccttgctttagagaatttacagtggacaaataggtgtcatcaaaccagtttttaatcattctgactcaagtgaaaacgctcagaatttcacactgtgaatccacgtttacaacccttacaggtgggccttcaggcctggttcgctacaacaatgtcttccacaactcaaactcccaccgcgctcacacaaccggtccactcctgccttttcactcacacagctcccgactgcttcttgcagaggctgagagtccccccccccacctttttttttcatttagatgtaacaaacctagtagtttatgttcatcaattgtctgtatatctctatattttatccatgtactcttttgatgtatagaagtagtttgaaactcattgtttccttgtggtaagtgaccgagatgctgccacaggacctgagacactgatgaatggtgctattttggactttcaacatgctccttggcgaggtagctctgatggagttattttttatttccatgttctaagaaggtgttggtactctgtttccctgaatgttgttctctagactggattgacttgttttccttgtgtcttcagtgtggctttcttcctcagtgttgtaggttgagcgaatgctaccagagtgtgagagaccattgtctcgttggctggcgctcacggacatgcagtcacggtagcgggagcaatcacaaaactgtaatttacttaccaaatctcttcctttccgtagcctcgcctgcctgacttagagaaagaaaagcaataattttacaggcattttgaggtgtctctttgggttctttctgtttgaaaggatatttgtcgaaaaaaagagcaaaaccgttttaaataaactccccctggaaaaaaacccaaaacactggcatctgagtaggaatatgaaaatgacaccttttccaaatattaaattggaaaacaaggtctacaaaatcatgatacttttttaaaaggcagagcattcttttttcggcaattttgataagcaaggtgtagatttacatttttgtccttgctcccaacgaaatggataaacaaaaataaattaccatctactcatggaatgttgttgtgttagccagtctgaaagcccaccttaatttttatataactgtctttagctcttcttttgacagggcaggccttgttctgaactgtttcgcttctgactgttaaacaccgatgacgcatgcactgcacttcttcgttttcttcttgctcccccattggcctgagtttcttgtgcattactcctctccctccttcgttagaataggtatatcagctgtgtaaatagagcaagaaaacagtattctgcatctgtggcatttatgtagagttgcagttgtgtactgctgaaaatgcaggcttttgtaacagtgtgatctttactgatgcactcatgacaagtacccaatgtattttagctattttagtagtatttgttcaataaatacgcaagctgtaaggtaactgtctg

SEQ ID NO: 1800 - DNA, 2842 bp, Homo sapiens
gtgggcatccacgggcgccgagcctccgtccgtgtctctatccctcccgggcctttgtcagcgcgcccgctgggagcggggccgagagcgccggttccagtcagacagccccgcaggtcagcggccgggccgagggcgccagagggggccatgtcgtaccagggcaagaagagcatcccgcacatcacgagtgaccgactcctcatcaaaggtggacggatcatcaacgatgaccaatccctttatgctgacgtctacctggaggatggacttatcaaacaaataggagagaacttaatcgttcctggtggagtgaagaccattgaagccaacgggcggatggttattcccggaggtattgatgtcaacacgtacctgcagaagccctcccaggggatgactgcggctgatgacttcttccaagggaccagggcggcactggtgggcgggaccacgatgatcattgaccatgttgttcctgaacctgggtccagcctactgacctctttcgagaagtggcacgaagcagctgacaccaaatcctgctgtgattactccctccacgtggacatcacaagctggtacgatggcgttcgggaggagctggaggtgctggtgcaggacaaaggcgtcaattccttccaagtctacatggcctataaggatgtctaccaaatgtccgacagccagctctatgaagcctttaccttccttaagggcctgggagctgtgatcttggtccatgcagaaaatggagatttgatagctcaggaacaaaagcggatcctggagatgggcatcacgggtcccgagggccatgccctgagcagacctgaagagctggaggccgaggcggtgttccgggccatcaccattgcgggccggatcaactgccctgtgtacatcaccaaggtcatgagcaagagtgcagccgacatcatcgctctggccaggaagaaagggcccctagtttttggagagcccattgccgccagcctggggaccgatggcacccattactggagcaagaactgggccaaggctgcggcgttcgtgacttcccctcccctgagcccggaccctaccacgcccgactacttgacctccctactggcctgtggggacttgcaggtcacaggcagcggccactgtccctacagcactgcccagaaggcggtgggcaaggacaactttaccctgatccccgagggtgtcaacgggatagaggagcggatgaccgtcgtctgggacaaggcggtggctactggcaaaatggatgagaaccagtttgtcgctgtcaccagcaccaatgcagccaagatctttaacctgtacccaaggaaagggcggattgccgtgggctcggatgccgacgtggtcatctgggaccccgacaagttgaagaccataacagccaaaagtcacaagtcggcggtggagtacaacatcttcgagggtatggagtgccacggctccccactagtggtcatcagccagggcaagatcgtctttgaagacggaaacatcaacgtcaacaagggcatgggccgcttcattccgcggaaggcgttcccggagcacctgtaccagcgcgtcaaaatcaggaataaggtttttggattgcaaggggtttccaggggcatgtatgacggtcctgtgtacgaggtaccagctacacccaaatatgcaactcccgctccttcagccaaatcttcgccttctaaacaccagcccccacccatcagaaacctccaccagtccaacttcagcttatcaggtgcccagatagatgacaacaatcccaggcgcaccggccaccgcatcgtggcgccccctggtggccgctccaacatcaccagcctcggttgaacgtggatgcgcggaggagctagcctgaaggattctgggaatcatgtccatcccttttcctgtcagtgtttttgaaacccacagttttagttggtgctgatggagggagggggaagtcgaaggatgctctttcccttttctgtttaggaagaagtggtactagtgtggtgtgtttgcttggaaattccttgccccacagttgtgttcatgctgaatccacctcggagcatggtgttttcattcccccttcctagtgaaccacaggttttagcattgtcttgttctgtcccttccacttctaactccactggctccatgattctctgagtggtggttcctttgcaccctgtagatgttctaggatagttgatgcatgttactaaattacgtatgcaagtctgtgagtgcgtctgaggggacatcgccaaggactgactgagacacgatgccgagacctcaagccctgaggggcagtcccaaaacccttacagtgaagatgtttactcattgcccccacctctggtccacactagaaagaagctcgccccacctccacctgtgagatccgtgaattctcggaatggcaggggaagccttgcactaggttgcagagaagcatcctccacatcctgtgtcagaaaccctggtctccgtggcacttgtaactcaccgtgctgtcttctggtctgtgtgtgttcttcaagccagctctaggcttcaggccgagccaggttcacactcagaaagatgtctccccatccccattcggggctgacgatggggggctgatggctgcccctgcgtggcctgagtcctggtccctctgaggcagttgacggggcagtcagatttttaaagttttgtacaaagttttcctttgtaatcactcccatttttacttaacaaccaacttgttgtggctcttatttctgaattcaaagcttgtgaaaaaataaaagaaaatgaactgccc

SEQ ID NO: 1801 - DNA, 4086 bp, Homo sapiens
aaaatagcgggtactgtggtaccggaggctggcggtaccagtgtggattccaagtgatcatcacaggtacatatagtgatcttccttgtccgtctcgtcccactgggtaccaggcgaatcctactgggtaggtcgggtacgcggcatatgtggggtatgtttggtatccaggtatttgaggtacgaattcagtgtacgttgccaggtgtgcttggtcttctaaatttggaatacataggcgaggatactgattctggatagtaaaattgtttggagctcggcaatcataagaaacttgcagtttccaccccctcttcacctggagaacttgggctccattaggtgcaatcgttggagtaattagcccatcttttacatttcttgccacaaaatctcgaagagctgccatttcaggttcggacagtgaatacacatgtccactgggaatactgtgtgctccaggtatcatttctatgtgagggtcaaccaggcggtgatctgggtagacgtgctcatctactggagtgtacacattctggacatagtaatacctcactggttggtaaactctgtatccatctactggataatagagtggcggttgtggtgctggtggtgggagcgatggtggtattggagaatacatccggcagtggtagcggcagtattcagaatcaaagacgatagatcgagtgctccatgtgatattgggatcatgtgtgctcagccagcgaacccctaggacgacagggaagaatggagactgagtcacatcaaatgacagcacctctcggtgatctcccaggtcaactatcaggtcgtgagtttcgtggacaactgggcccgatgctatggggcgcccatcaattgcttccacaagtattggccagtccttgattcttagaggaattccattttgagcaacatattcgtgatcaatgaagttgccagaagcaccagaatcgatcatggctcggacgaacagggtgtgtctgcccggaagatgaatctggagcatcacttgcaagtgtggagatgaggcatcatcttgtggggaccttattatttctggcccggtcgctgaaggtccctctacagcggggccggggagtttcccgccggcgaagactttgaggccttggcaggacaattgtcagcgtagtgacctcctgttccacagtagaggcacaggttcagctttctgcgtctttctttttcttcctgcgtcaggcgcatgcgggcacctcccaccggctcggttggatctacctggtggtggcttgcaatgtgaggcaacaccagcgcccggggtggcgagcgtggcttgcgagctgcagcagccctggccagccttctctcaatgtgaatgcactgcccaatcagagcagacagcgacttggcgacctcgagcaacattaactgaggaaaaaattgaaaaaggggcgcccttgcttgggggcttcctattgtggaactgttatggaaaggagccccatccattgcttcctccttgaatggcaaatgcctttatgatccctataacttgtcccattatgtttagacccttggtggtcagaagggttctatttagggcagtgtcccctgcccctccttgtcctccaaaaattttgggaggcactgacgtggatgtcatggggtcagcacaggcatcaacatccccagagggatggaaccaagcagcctattgcccaggcattcactaacaggcagcccatcctcagcctcatagctggccggggagaagaaaggctattttgggtcccagatctttttttttttttttgagacagagtctcgctctgtcacccaggctgaagtgcaatggtgcggtctcagctcactacaacctccgcctcccgagttcaagagattctcctgcctcagcctcctgagtagctgggactacaggtgcgtaccaccaagcctggctaatttttgtgcttttagtagggacgtggtttcaccatgttgcccaggttggtctcaaactcctgggctcatgcagtccgcctacctcagcctcccaaagtgctgggattacaggcatgagccactgcacccggtctctgtttacaaatttatcaccagcttcatcccctaaggttataagctccatgagggtgggaagtctgtattgttcacctctgtatcctaagcatctagaacatagcccggcacacagtaggtgctgaagaattgaatctgttaatgtagaaaggatgtttcatctagctgaagtgtcttgtacagaataaactctcaataaatgaactgtggacacatggaagggtgagctagagctctgctcaggggttgagtgctcctcttgtgcccttgtggttgtctggttacctgaactaattggagtgcgatgcagacatagtcatggagtgagacagcagaactttgctgtcttgtttgtgagcccacatcaggggttctagactggctggttgacatggtggccccagcctgtctcttcagcagctcggcttataaaaaataaccacctcctattttggcctctttggccgaattcggccaaagaggcctagcctccgattactaaaccccttgccccacaaacgtccacattgacgagcctctttttagtaactgcttccccgtaattccttcagaggttgctgtacccttcgctgatgtgctgccctcctgtaaaacctccagatgccttcccacgtaatgcccctttcagatgctttaagctgagagcttaaaccacaggtaccatggctgacgcctgccaggtttctgctgcagataatctatgatgggaggggcatattttttacttcattacttatgtaaactcttgttccagaaagctttaatgtgtgtgggagtgttctgggtctattaggtctgtgcgcatgggtgtgggcatttgcctgtgtccaccgggtgggtctcattatgaaatgtatgtttatgtagggctttaatggctgaaaatggcaaagagatgaatagaccacttggccccatgtgtaattgccaggccccttctgtgctcaaatgaggtgtccgagtgaaggtcagcccttcccttctgtatttggggcctatttatgccaccagtaattttataagaaatctgaatagttctcccctttgagtgcatttaactctttagtatcttctctcttacctatttgagcccctctagctacagtctggcttaaatgaaaggggaattatatgcttaagaaaaagtaggacacggttgaggcagtttgctgactgaatacgcgaagaaggacctgatgggctcatatgcaccactgccatcacagtccccatcgtgatgcaagcttatatgattcttgaggtaactctaccagatacttccagatttagaaatgtgtcaaaggaaaaattggtgatactcttctttccctgccagaaacagcccagatctcctcttaagcggaaaagagattgaccttctagcagaggcaaaggtaaactcctgtaagttacttctgttaccaaagggaggggggcggcttttgtgaatgtatgaggagcttttgccagagagatattcggaggaggggtgtgcccatatgcacacatatattttcccgcataaccgtatccaatgctagcatttagaggaaggcatttagccaccaaaagtccatccatctatgctgcttccacagagaaaacattttctctttcctcctcttgaacttacataatatcctcctcccattccaaccttagaatggagtcttctgggggcagctgcaaagcgttctccctaggacagatggagcctccctttcctcatctactctgtgggtggtttcagggcccacgagtcaacatgaggagttgtgctggtggtatgtgtgttggaggctgggctggctgattcacagtgacgaggatgtcaataataacaagaatgagaatgatggtacctaataaagactttttttcccaaaaaaaaaaaaaaaaaaaaaaaaaaaaaaaaaaaaaaaaaaaaaaaaaaaaaaaaaaaaaaaaaaaaaaaaaaaaaaaaaaaaaaaaaaaaaa

SEQ ID NO: 1802 - DNA, 2512 bp, Homo sapiens
gcggggcctctaccggcccgatggagcgcgcgggcgctactagccgcgggggccaagcccctggcttcttactgcggcttcatactgagggccgagccgaggcggcgcgggtgcaggagcaggacttacggcagtgggggctgacagggattcacctacgctcttaccagctggagggagtaaactggctcgcccagcgcttccattgtcagaatggctgtatcctgggagatgagatgggcctggggaagacctgccagactattgctctcttcatttatttggcaggaagattaaatgatgaagggccatttctgattctttgtcccttgtctgttttgagcaactggaaagaagaaatgcagagatttgctccaggtctttcctgtgtaacatatgcaggcgacaaggaggaaagagcctgccttcagcaagacctgaaacaggagtcacgttttcatgtgctactgactacctatgagatttgcttgaaagatgcatcatttctaaaatcattcccttggagtgttcttgttgtggatgaagctcacaggttgaaaaaccaaagctccctgctgcataagaccttgtcagagttctcagtagtcttcagtctcctgttgaccggaactcccatccagaacagcctccaagagctctactccctcctcagttttgtggagcctgatctcttttccaaggaagaggtgggagattttattcaacgctaccaggatattgagaaagaatctgagtcagcaagtgaactgcacaaactcttgcagccatttctgctgaggcgagtgaaagctgaggtagctacagagcttcccaagaagacagaagtagtgatataccatggcatgtcagcattgcagaagaaatactacaaggccattttgatgaaagacctagatgcatttgaaaatgagacggcaaagaaggttaaactacagaacattttgtcccagcttcgaaagtgtgtggatcacccatatttgtttgatggtgtggagccggagccttttgaagttggagaccacctgactgaggctagtgggaagcttcacctgctggataagctactagcattcctgtattctgggggccatcgggttttacttttctcccaaatgacccagatgttggatattctccaagactatatggattacagaggctacagctatgagcgtgtggatggttctgtgagaggagaagagagacacttggccattaagaactttggacagcagcccattttcgtttttctcctgagtactagggcaggtggagttggcatgaacttaacagcagcagatactgtgatttttgttgacagtgactttaatcctcagaatgacttgcaagcagctgccagggctcatcgcattggccaaaacaagtctgttaaagttattcggctgattggtcgagacactgtggaagaaatagtctataggaaagcagcctccaaactgcagctcaccaacatgatcatagaaggaggccattttactctgggagcccagaaacccgctgccgatgctgacctccagttgagtgagatactcaaatttggtttggataaactgctggcctctgaggggagcaccatggatgaaatagacctggagtccatcctgggagaaacaaaagatggccagtgggtctctgatgccttgcctgcagcagaaggagggagcagagatcaagaggaaggaaaaaatcatatgtacttatttgaaggtaaagattattctaaagagcccagtaaggaagacagaaaatcatttgaacaactggtaaaccttcagaaaacccttttggagaaagctagtcaagagggccgatcactccgaaataaaggcagtgttctcatcccaggccttgtggagggatctaccaaaaggaagcgggttctgagtccagaagagctggaggacagacagaagaaaagacaagaagcagctgccaagagaaggagactcatagaggagaagaagaggcaaaaggaagaggctgaacataagaaaaaggtggcctggtgggaatccaacaattaccagtccttctgcctgccctctgaggagagcgagccagaggaccttgagaatggggaagagagctctgctgagctggattaccaagacccagatgctacttccctcaagtacgttagtggtgatgtcacccaccctcaggctggggccgaggatgctctcattgtgcactgcgtagatgactctggccactggggcagaggtggtttatttacagctctggaaaagcgatccgctgagccaagaaaaatatatgagctggctgggaaaatgaaagacctgagtttgggaggtgtccttttatttcctgttgatgataaagaatcaagaaacaaagggcaagatttgttggccttgattgtggctcagcatcgtgatcgttccaatgtcctgtctggcattaagatggcagccctagaagagggcctgaagaagatatttttagcagc

SEQ ID NO: 1803 - DNA, 1014 bp, Homo sapiens
gcagaaatagcctagggagatcaaccccgagatgctgaacaaagtgctgtcccggctgggggtcgccggccagtggcgcttcgtggacgtgctggggctggaagaggagtctctgggctcggtgccagcgcctgcctgcgcgctgctgctgctgtttcccctcacggcccagcatgagaacttcaggaaaaagcagattgaagagctgaagggacaagaagttagtcctaaagtgtacttcatgaagcagaccattgggaattcctgtggcacaatcggacttattcacgcagtggccaataatcaagacaaactgggatttgaggatggatcagttctgaaacagtttctttctgaaacagagaaaatgtcccctgaagacagagcaaaatgctttgaaaagaatgaggccatacaggcagcccatgatgccgtggcacaggaaggccaatgtcgggtagatgacaaggtgaatttccattttattctgtttaacaacgtggatggccacctctatgaacttgatggacgaatgccttttccggtgaaccatggcgccagttcagaggacaccctgctgaaggacgctgccaaggtgtgcagagaattcaccgagcgtgagcaaggagaagtccgcttctctgccgtggctctctgcaaggcagcctaatgctctgtgggagggactttgctgatttcccctcttcccttcaacatgaaaatatataccccccatgcagtctaaaatgcttcagtacttgtgaaacacagctgttcttctgttctgcagacacgccttcccctcagccacacccaggcacttaagcacaagcagagtgcacagctgtccactgggccattgtggtgtgagcttcagatggtgaagcattctccccagtgtatgtcttgtatccgatatctaacgctttaaatggctactttggtttctgtctgtaagttaagaccttggatgtggttatgttgtcctaaagaataaattttgctgatagtagc

SEQ ID NO: 1804 - DNA, 17569 bp, Homo sapiens
ggatcccttgtaaccccatgatgcatgtttatcttcgtactttttatttttgttgttgtttttttcagatggagtttaagcccagctggagtgcgatggtgcaatcccaactcactgcaacctctgcctcccaggttcaagctatttttcctggcttagcctccggagtagctggaattacagatgtgcgcccccatgaccagctaattttttctatttttagtagaaatagggtttcaccatgttagccaggctggtctcgaactcctgacctcaggtgatccgcctgcctcggctcccaaaatctcttgttatttaaagattatctctttgtctggcttttagagttggatgataacacatataggtctgagtctctttgactttatgctatatgcagttctttaagttacttgaatttgtagatttttgtctttaaccaatttgaaaaatttgaatgattttattctccaaataatttctctactaccatgggtttgcacttccccttctgggaatccaatactatcatactggttggcttgaggtgtcccataagtcccttaggacctgttcacatttctttattcttgcttcatgtccttagactcaggaatttcaagtgtgctatccctatgtgtattgattatatcttcatcctgctcaaatttgctattgaaacactctctggtgagttttcattcaggtatatttttagctccaattgttcctttcttttataatttggtaattaatacctatattgtgatttctattttcagatttctgtagttcttaatccatattttcattagcaattttagcatatttaagacagctgtttaaatgcttctctactaatgcctgtgattcttcaggaatgattctacgatatttatttctcctcataatggactgtgaatttctgttcttggtaatgcccttgtcatttatttttgagctgagtcttgctctgtcaccagaatggagtgcaagtggtgccatctcggctcactgcaacctctgcctcctggggtcaagcgattcctctgctttagcctaccgagtagctgggactacaggtgctcaccaccacgtccatctattttttttttggattttagtagagacggggtttcaccatgttggccaggatggtctccatctcctaacctcgtgatctgctcaccttggcctctgggaagtgcgtgggattacaggtgtgaaccaccgtgcctcggcctgtgtatgccttgttattttatttaactgggcatttgaaaaaataaacatcttttttactgtatatagatttgttctatgtcatgacagtcattaacttatatgtgcgcgagttctcatcaagacatcagccctacgtaaaactcaagtccttctagttgtttctgaacatgtacctatgtggactgtgttgccctttatatttccccaaataaccaatggcttttgaattgcttactattatgaaattttgcatcccagttctcctcaatagcttagatggactattgcatgtctctcccctggcctttgcctataacatctgtatgtgtatagtcaccctgaatctctactgagccactccagaaataaataagtttatttcagtcaattttaggtattttctgatgtttccatgagttatatgggaatcttagaatccaccatcttgttgaaattactctgtgaaaaaaattttcaatatctttataatattacatttatgtcaatgataacaatttacctatttttcaatttctgtttgttttatgaaaaaggaaatagaagcaatcagggcactgcaagttgtgcctactccaagatgtgaatcatggatcatgcaaattacaatcatgttttaacctgacctccaaagggagaataaagtaaaaattatcccatgtgaggattattcaccagtttatatgtcattagttaccagttttcctttatgaataatgtttagcaatattataaagtatatctaatagttatcaggttttttggctcgttactttttggtagtaacttataaaactgactggaaaagaccaataaggcactgtttgcatgttacaaattatatccaaagaccaaaagctgttaataagaaatcttccaataaaaccacatcatattttcttttttatttacacccacatcaggattacaactttatcaggactgcaccttgatcaggaaggcctgtttctcttacaaggctaataagaaaggaacaataaatttgctgatgaaaaaaagtcatgtatttaaaaattttaactttaatttttaattgagggcaatattttaaagaaatgctcattagtcattcctttaaattgtgtgtgtgagagagagaaaatgaaatagtcattcaatgctgcagatgcagaggactcatcatcatggcacaacaaaagagctgtgcactagagttctatatctatgtaagtcacaatttgttctacaaatctctttgagtaatttatgtctcatatatagagatctggaatagcaaaaatacttcagaggaaattaatgagtgtatcatgaccacataataatttacttatgaattttcttaggtaagaaacggttgaactggatgcaatttttatcacagcttgtgtaagactgcctctgtccctcctctcacatgccattggttaaccagcagacagtgtgctcaggggcgttgcagctcattgctcttatagcctgtgagggcacggaagaaacatttgctaaccaggccagtgacagaaatggattcgaaataccagtgtgtgaagctgaatgatggtcacttcatgcctgtcctgggatttggcacctatgcgcctgcagaggtaacaattaatattttagtgttgagagttcaaaggagctagagtaagtggaagctgaccaggttgtcaggcttgtgttccatgttactctgcatgactccctttaaacgtcagtctttgtctgcaatgccgtcttgtcacagggtcatctactgctattgtgcactgtttgtcttctgtatgttatttcacagcttgtcagagtctataaaactcagcagaaagaacacggcttgcctgctccctctcttgaagattgattgtaatgggagtggtttctctgtttctttgtatagtcgaacagatatttacgtcttccaagaagatacaattcagaggaatttttatggcaaaagttagtggagacaggtggatgaaatctgtgaggagagtatcactgttctgatgggcggccgtttgagccacccacactgtaatactagacctgcctaaagagaattttcccatgtactattctcacctctgggaaaattaccctgaatataaatatgtccctcattttaagaaaaaaaaaactagaaccaaacaaggaaagtttaaattctttgtctttgttaatatggggtcagatttgtataaaatattgtaacagaaaaatttcttgttctctgacaagaaaattaatggaatatattttattttctagatttagaaatagctaaatactatttctatcactggaagaaaacttgtatctcaagactgtcttgggaatacaatgtgtgtgaataggaactagttatataaaatttgagtctcacatttctcatctataagatataaggagttacaaagggacattttgaagaccattgacaggagtggtttattttgtaatataaattggcatggagaggaagtaaagatgaggataccactgaagctccggccttggtaagcctttgattgcttgcacagcgaagagaagatcaaagatggtatgaggagagggctgtgagacccggtatctagttccttgtaatttcacaggggggagcctctggaatactttcaaggtgggaagatagtttgctttgtttctgtttttgtcatttaaaagatatactgtcaaatctgtatccaaatttgttacataagtcaatcaattgtaaattttactgcaatcatatgtttcctgacagagttgccttgaatttatggagctgaacccattttgctaattcacttactcctgcagcctatttcttagatacacaaatcaatatccttagagtatacatctttacacctagtatgtggttgtgttatgcagacagaatggccaaaacctgggtagaaaagatctaacataatagactgctatccatagatgtgcctatttccaatataaacctgctggcatctgagaaagtggagttctccctgtttcctaactgataagaatggtggctctagctaactgtttgtgtaaactgtggggtttctgtgcacctgctttgcttttggagactggaagatttgtgtctgctaggcagagtgagtcaatgtatccagtcccagacaaaatcttagcaatggagtatgtagagggcatctcttgtagacaacagttcacatacattgacaaaatatgatgctggataaagtcagtgcgctctgtgcaacatggtgggagaggaatcacaggagcttacactgcattccttcataattccttccatgtggctatttccttgtgttaatttcaccatactaaaaataattaagattatgtctgttaactatagttgcgtcctgttgatttttccaaaaaatcactgaaagtgaaattattttggggacacttccaagctagtggtcaagcagtgatttttctgggactgcagaagttcctgctatgcccaacctttattactaaatgggaaagacccagtcagactgggatgggcttatgattctacatacagagctcatccaagaaaggaggaaaagctgatttttgtgaacgttgctgcttgtgcccgaactaactctcaggcacattagtcagaaaatattacgtttggttgctccccgaggttcctaaaagtaaagctctagaggccgtcaaattggcaatagaagccgggtaccaccatattgattctgcacatgtttacaataatgaggagcaggttggactggccatccgaagcaagattgcagatggcagtgtgaagagagaagacatattctacacttcaaaggtactgtgcctatgagcttgtgtgcacatgtatttattccddgtgattgtgtggaggtggcagttctatgactggatcagggtgaattgtgcttatttattacgatttattcacacttactcatgtattaaaactaatatcaaaggcaggaagtgaagatggctttctcatctttgcagtgttccaattcatgccttcaaagatgcctttactctttgagctcagcacagatcaatatggtttaacatagactatagaatgagagataatcttaatcatattatgttatctgttacctcctgggtgagtttcttacatttgttatgattttgagtttccattgtcattttgatcagagagagagagaagcgatataagagagctcagtgagtataaaagagtgatacctacattgttttaaattgcatccagcccaagttaacatattaaaaactgtgtttgcctcctcagtttccaaaccacaaagatacttagtcttgcccattgggctgaatagatgaaataattacacactaatatgagttgtaaaacttaccaaagataattcagataatgggtatgcttatgatttgataagaacttttaccttccgagtaatttcactctttcattgcaatatatgtactgaactatatatccaacatattataaagttcgtcatgatatggcagaaaaaaaggcatgacaagaagagagagaataattttgcctgtggtcattagttttgaagtagtagaaaatgtctaaatattaggtggagcaaactagtaaaattggctcaagttttgattccacaacttcctttctctaacactctgcagctttggagcaattcccatcgaccagagttggtccgaccagccttggaaaggtcactgaaaaatcttcaattggactatgctgacctctatcttattcattttccagtgtctgtaaaggtaggcagcttgtgtgatcaaattaatttcacttttgttctcagcataaatattgttttcatggagatttgaactaagctttttcttaggaggacatagggattttaacatggaagaagagccctaaacataactcctaattcctttctatggaacagaaagcaattttgaatccatacttccgtgattcgatgtctacaagaaaagagagtcgagaatcctcaaaagcctctgcctaaaaaacttgaggaaatgacaatcgatctccttgaaggctactaaggtcttatgaatgattcctgatgcacctcttgggatgttcacagacacagagtttcatgaagctgtggagtccagaaaacctgctgcacatagggtgcacaatgagtttccatttcttgcctcttttcaaggggcaagaactcagtccgggaatgtcttaaactacaaaccttcatgggaaaccttgttgcttctgcttcctctcttttcacactggaggtttgattttttcttagccatgtaattcccddgatatatgtactaactatatatcgaacatatgataaagttgatcatgatatggcagaacaaaaggcatcacaagaagagagagaataatttggcctgtggtcattagttcggaagtagtaaatgtctaaatattaggtggagcaaactagtaccddaaactggctgaagttgggattggccactggttgctctaacctctgcagctttggagcaattcccatcgaccagagttggtccgaccagccttggaaaggtcactgaaaaatcttcaattggactatgctgacctctatcttattcattttccagtgtctgtaaaggtaggcagcttgtgtgatcaaattaatttcacttttgttctcagcataaatattgttttcatggagatttgaactaagctttttcttaggaggacatagggattttaacatggaagaagagccctaaacataactcctaattcctttctatggaacagaaagcaattttgaatccatacttccgtgattgcatgtctacaagaaaagagagtgcagaatcctcaaagcctctgcctcaaaaacttgaggaaatgacaatcatctccttgaaggcacaaggtcttatttatgattcctgatttcacctcttgggatgttcacagacacagagtttcatgaagctgtggtgtcagaaaacctgctgcacatagggtgcacaatgagtttccatcttcttgcctcttttcaagggggcaagaactcagtccgggaatgtcttaaactacaaaccttcatgggaaaccttgttgcttctgcttcctctcttttcacactggacggtttcatttttgcttagccatgaattcttgtgtcattcataacttttgtcttaaggaactgaaaactagtcaggctagttaatgcaaaagggtatattagatatgactaatgggaaatcaaagccagggtacattaagaatttgataaaaactctaaaaatatatcctttctccacccttatctctgctttattacaaaaggctttttaaatatttgttccaacctttttcgttggtggcatttatggctttggagttcactgtcaggcccatgttcattaccgtgagctcctgtgcatctcctaatttccaaactagcctggaaaacgcctccattgaccatgattggttcatggtcctgtgcacggaacatcacatgttcagggagataaagaactctgatagtggcacctgggtaaaaagtacaatccattatatctggatatcaagatcttttgcagttgaagagaggtattgccacagagaaaattataggagcagaagaaagtcaatgaaagtcaatgatgacactccattaggaaccagaaagatggtatttatttacacatataataggtgtaagagattagaggaagcctgtcacctgaagacattccttataccttcatatgtagtacactttgtacataccactctctggagcgctgcatcacctacctcatggaggattagtgtccttaaatgtacctcagagcatggctatgtgtggagaaattgacttgtgacatcactaaactgactgcttctacttcagccaggtgaggaagtgatcccaaaagatgaaaatggaaaaatactatttgacacagtggatctctgtgccacatgggaggtgagtgtttggaggtgagagaacggataagaaagatgaggtaggatacatctgtttcctatcttcttagtacaagtatggaaaatgcaccattggatcaaaaacttaggaactttacaaaggtagtttttgtgagcagcgaggaaaaagaaatgacaggcatacaaaagagagaagtggtggagaagaattgggggtaaggaggactgggatttctttccttgcctgtacattaatctctccactttcctaaggaggaaacagaaattctcactcttgcaatcactatcttcttccccaatttttctgttttattttctcccttttaagaaccacggctagctagtttgattgtcacatctagacagttgttgctttcacagttctatgttacatttatcttgctcttcagtcgactacacaaatgatacctcacaattcctttttccaggccatggagaagtgtaaagatgcaggattggccaagtccatcggggtgtccaacttcaaccacaggctgctggagatgatcctcaacgagccagggctcaagtacgagcctgtctgcaaccaggtgaggcgccctcagcctcctctgcctttctgttcttcatgcccctgctttctgtcctattggccaagtatccattcatttagacccacttatctttgtaaaagagaagattctagagaacaaagcctcttcctagaagggcatggagtcctcttacttgtaccctgcttagaaaagtcttacgaaaaggtgttgtaactttgatgctgaattgtgtgttacatttataggaggtcaattcgatcaagaagtccaaggattgccaattagactcagggaaaggtggattacccctaagctatgaaagatgaccagagagtggacgggctgaaggtgatttggagggaactgtgcatagatatgaagccatgaagagatgaaatgaacagtacataaggagagagtgagagcaagagaagagaaatactagggattcacatgggcttcggatgtctcagtgcctcttggtgtctctgctttcacacttcttgaccaagggcatagatacactaaaaattatctgcagacagtgaaggtcatccatggtagaaagagaaaatgacctgtttatggagatatctgttcacagtggatgaaatccacactgaggaaggttcagcagaacatggagctgacctatgactgcgggctcctagtcggctgctttttggagtctgtcatgcaatcagctgcttaaacacatctattctatgcatggttctctcatagcctagagataattccatcttttccttgagtcctgactggtgattccaggcctccttgatcaaattgactgcccccaaatgttacacacatttcagcattaaaatcactacacctttcccagtaacttacattttttgttataattttgttataatttggtataatgatatggtctgtgataatttaataaaagcattgagaaattaatgtggtttaatactagtagttccccaatttttaatatggccattttcacactttccaaaaatttgataaaaataatactggagacccatgttaccatttatattcaaaattactaacattttgcaatgttatatggagtatatctgcataaatacatataatgtttctagaacctcttcaaggtaaattgtaaagatgacaattgacccctagagacctctcaaagcatgtcacaggaatgaagatattctcccagttccagtgtcattactgtatctaagaacatcatttatagtgcccttatgtcatttggtatccggtccatattttaatttttcattgcttaatcaaaatatcttttgtagctcttctttttttaaccagaattcaattgtttttatattgttgtatttgatatatcagttaacttgtttttcccagttgaaggttcctgtaaattaaaagttagatgtgagtattttattacattggcttaaaactttggggcaagaaaatgtttttatcatgctgtgtttttcaaattgcacgacactagactgcatacaatcacagaatgccccactagtggtgaaggtagttttaaaaacttggttaagctaacagtggtcagatctgttgtttttaactcatgttttctctttaacaattactagtaatctgctgggggataattctcaacagaagaagtcatattcccatgacaaattttcacatatgattgagtatacatcagtgatttgaacttttttctactgcatttctgttttcttctttgttatttcttatttgttatttccttggggtttttacataatcatttacaattttaaccacttgtttaactattcttacctgacatttaattaaaaataatttctcaccaagtaaaaataataaactactattcctctaagtgagagtaaaggtaaaccttcttgccttcaattagcaatgtactgtgaacgaattactgtaatgaccaccatcagagtagacaaagattgttgttctttttctcattgtcgcactaattgctacagactcacggattcttgtgtatgatttttaatttattttactcattttttaatgctcacatctactcagcatatatatatatattatatatatataatatatatgaagaagatgtggatcaaagactcatgagggcaagtgtaaaagacaaaagcacttgtttcatagggaacccactggtgacatttgagatatcaacatacaaaatccatcatacaaaaaggaaaagtaatgaaagactgtgaaaattatcagtatttatgtgtatatgtatattttctagttcatctatatagatatatatcatagatggcatatatgatatatatatgtcagatcaattagaaaacatacatatatatgtatgcatttttggtattaattaggaaactagttcttttgtttttcagacctgccctcatgagtctttgaccaaattcttgatttctggcacgatttgatgcccaaggctcaaagaatcttacctcatcccagctctgaaattggccgtgtctccttctagtggtcggagttattgagaaaccagataggttcatgagttgcttgtgctcagaaatagcatttctattttcttaggagagagggggcataaaatttatttttatgaaaaagatcatttttgaccaataatattctcagttcaaatttaatgctctacattattcagcttcttttactttggtgattttaatattaatgtaacttttggattatctgatgcttttccatcttgctcgtctgcaggtggaatgtcatccttacttcaaccagagaaaactgctggatttctgcaagtcaaaagacattgttctggttgcctatagtgctctgggatcccatcgagaagaaccatggtaataagagatacaggaagtttgccgaaaacactggtatgataaaaaagctgggagaaaaagggatcatgctgtttcctggagttcactcacagctgacttggggtgagggaagaatttgcatttctgacgagatcccaggtgatgttgaggctgctgtttgggggcctcgcttgagaagctccggtgcagagtggacgccttagtctgttagggagccgcctaacaaactgtatccccagcctcagggcctcagcctttctgcctttccttccagggtggacccgaactccccggtgctcttggaggacccagtcctttgtgccttggcaaaaaagcacaagcgaaccccagccctgattgccctgcgctaccagctgcagcgtggggttgtggtcctggccaagagctacaatgagcagcgcatcagacagaacgtgcaggtgaggagcggggctgtgggcctcaggtctcctgcacagtgtccttcacacgtgtgcttcttgtaaggctctcaggacagccttgggccagctccatttccctgtatttcctatgcatgaactctttgtgtacgtcataagggtttcttctactctagcacaggagaggcaacagaggtggagagtaataggatgggatcagaactacagatttgggttagcgttaagtcagtgatatccatatccctctgctggggccatgtccttttctttattttttataatgaagcattgattagatgttctttagtctccaactcatggcggatttttcttcttgtatgtttatgtagtataaattccttatatttattctcttagaattttatctttgcgaagtgcttgtttaactctgcctttttttttggcgaggtggttgtgtgtctttatttttatgtgtaggagaccatatttataccaataccttaggatataagacaaacccacttaatatagaggcttaatgcacaagcatttattgagctcaaggttccatggttagaaaattagcctgggctcagcctaaactcagtccattccttctattcctggctgggctctcatgtgtgttctgggcagtgaaggagctctgcttcaggatgtccctggggcatttgtgtgagtgcccccctctcccatgcagttctttatcctccagccatccagcccagggttcacctcagcacagggcatagtgaatggacatgtgcaaagcctttttaggtctaggctcagagacaccaaccattgcttctgggaaattctatcacctaatgcaagttacaggacaggtagactaaggggtggggaaacacacaccacctcttactggaaggaactgaaattcgatatagccaagcaagtggacacagggacatatgactgttagagggcatgttcctaattgaatcgtatcgattcatatgatatgtgtgaaataatatatcaatagttatatgtatgaatatgaatatatataaattgatatattatttcatatattctcaagaattcatacaagtctctaaagaattaacatccagaatacatacatatgtgtatgttttctaattaggtagatacataaaatatacatcatgtatgatatatattataaaacctatgtcatatatatgacatatatcatgtatatgtatatacgtcactatttgctaaaacattaagtaaaataagtgaagaaatcgataggatactctgaaatagtgatacagagaacgagagaataaaaaatgacaataatgaaacaattgatgaatcgaggtaatggcattccttaaattatttttaaaatatttttggacattagagaattccaaaaaaaaaatgaaaagttatgaaagaatgtggaaattataagtattaatacatatgtgtatgtctctaatcgatctagtatatataagatatatatgatatatgacatatgtgtatataatatatatgtagatactagaaccatacatatatatgtattatctgatataatcttagagacttgaatgtatcttgaaataacatctcccaaatttatctgcgttgtcatattctctgtggttatgtttttcacaaacaaaagtttctatccttcatgtagactaatttttcatgcctctttcttgtggttggtgtgtgttgtgtcttatcctatattgggaatatcacaatattttactgtgttatcttacaaaattgttaatattctttccttataaatttggttaattctaatgggtatgacttttaaaatattatgtgaaataaggatccaaatatgcgtatctaatttttgaatttttagcaaaatttaccatttattgaaaagtttatatttgctcacataacttgaatttttttacctgacacatatatgaaatgtccatgagcaattatctggcctctcttccatcttcagttaacttattcacttttctgtgctataatgttaaaaagtaagtttcacttcatatggacaatattttctacttcttcatttatttaataatatcttagttattcttgactaatgtgttatttaaaattttgaatcatcttattaacttccacaggcaagtaaatgttttagtctctcattgatcattgtaataagcctgcagatcaatgcagagagaactgaatctttgataatattgagatttccagtccatcgatcataatatgaatatcccactacttattaataaatcatctcttaataaatatatcattaattgcataaatttctccacgactgatcattttttttttgagacagagtctcgttctgtcacccagggtggagtgcagtggcacgaactcggctcactgcaacctccacctcccgggttcaagcagttctcctgcctcagcctccagagtagctgggactgctggcgcatgctgccatgcccagctaattttttgtattttagtagagacggggtttcactgtgttgcccaggctgttgcccaggctgttctctaactccgtaaatcaggcaatcctcctgcgctggcctcccaaagtgctaggattataggcgtgagccaacgtgcccggcaattactgataattttaatagtttttgacaacttttcattttcattttgtggattttctaatatatagaaatattaaaagaataatgcaacaaatcttctacctacattcatcaagtgttacattgctgtcatttttttactctctatctctcattttctgtattactccttcagtttccctatggatttatacacttatttgattgaatgtattagtttgagtgacatctttttgatatttagagtctcccaaatttacatagtgagtacccacaccttttgaatgtgaaatcgttagtatttagacaattattggcttgagtgatgttgaaaactgatttttcctattatacctgttcattggagagatagatattcaatgttattcatcaaacctactaaattatgctagacattacaaaattgcctctagattcttgtggggtcttctaggtacatggccctatcatgtgggcacaaagtaagctctgtttcttcttcagcttcctctgagatattctcttcatctgcagtgttgtgcagtttcaaaatattttatctgggaatggatttctgcttatttttgactggttttcattgaccacttgggtgtttagagaggtctttcataaattttggaaacgtatcaatcttttttaagtattgtctctgcaccctattgtctgatgaacttggttgttcccaattggcaatgatgtaatctaaaaataattaaagttccctattactgtgataggtgtttgaattccagttgacttcagaggagatgaaagccatagatggcctaaacagaaatgtgcgatatttgacccttgatatgtaagtgattttggagatggttgttctaatttatttcagaggaggaacgtaggatgggtgttgagagtgtgacctccacaccaggggcacagaggccaacgtagaacagaggtgagaacaggagctttctggaagtctcctcctggattcactccagagctctgttctctggcagggagagtggcctggggtcagcatgggtcaacctgtgcctctgctctcgtgactccaaggaactttccagagcagccaagatcattgctgaatccgcaccttccatgcaggcctgccgtttgtattactgtctagtgtacacactgtggatatggccatgtggtcgcattagatgtttccaaatctgcgcttctatcttgttcttcccaacctgctcaatgtcttaccagatgggaggcagttccgtcaatcttgtgggccaggttccaattccacctctttcacatggatgcttgctggatcctgtcaatttagcattttgaatcatttcaaaccttttacgagcctttctttgcatgttttcccatgagccaaatactgcatttgcctccagaaagtctgtcttagtggagcgaataggagcacttggccttggtgttctgcaatatggagatctcagtgtagagaatgagaagtgttaaaatcaaatgcagagtgtagatgcaaaagcaccattattggagataatttataaccagtaacgagacgttttactattcctctatattctaaggtttctaggattcatacgaaggatcattcatataatgagggaaaaaggaggtaaggtactgactgcagtaagaatttcaccaggtatataggggatgatggggattatgtgtgaaaaaaaacaagcacatggtacatcatagtacccaaaatttggtggatattattagtagtattttatccgcttagcagaaaatacaaaatgaaaaatggaaatgataataagaaaaggaaaagtggcaagcattagaaatgtttacttctgattaatgttttttatgatcatgaaatcaatcactagtgttattgggtagaactcaaatatggtctggagtaaaccacttgcgagctccaagtgtttgctctcggtgtaatcacaaaggataggctcaattccggtaattaacaagttataactgtatatgtgagcagtcatttatctgtgtctttacattttggattatgtctacctataaaatggtttatgcattgtagctctctaatattgggccctatacataaacaataatttaacgtgtctaatctaaccaagtgtgttgcgtatgataggcaggtagtaagtaatatgtaaagtaataaaataaagaacaattactaccagtataattaatgtactcaaaattgtttattagtgatgagcatatatcttccttattcctcttcaatgtaaggcagaaggagttcctgttggaagtgagaatgtgaaatagaaaaggtcagaatgtctctccattgacagatgtgggatctgttgttgagagatgtagagaaatatggtttgacatttcaccttgtgtgttttatgtggttaagttccaggcaggggaatagaattaaattattctttattttgaaaatcaagatatgataaagtcacgagttcattaaacaaagaaacacagattctagagcagtcagaaaatgaacttcttaacatctacactagcggcagcttcctagaaatcactgcgctaccggctagtaacggagtcattgccattcagagtgtgcatttttttttcctctttccagttttgctggcccccctaattatccgatttctgatgaatattaacatggagggcattgcatgaggtctgccagaaggccctgcgtgtggatggtgacacagaggatggctctatgctggtgactggacacatggcc

SEQ ID NO: 1805 - DNA, 791 bp, Homo sapiens
ctctggctggacgccgccgccgccgctgccaccgcctctgatccaagccacctcccgccagagaggtgtcatgggcttccaaaagttctcccccttcctggctctcagcatcttggtcctgttgcaggcaggcagcctccatgcagcaccattcaggtctgccctggagagcagcccagcagacccggccacgctcagtgaggacgaagcgcgcctcctgctggctgcactggtgcaggactatgtgcagatgaaggccagtgagctggagcaggagcaagagagagagggctccagcctggacagccccagatctaagcggtgcggtaatctgagtacttgcatgctgggcacatacacgcaggacttcaacaagtttcacacgttcccccaaactgcaattggggttggagcacctggaaagaaaagggatatgtccagcgacttggagagagaccatcgccctcatgttagcatgccccagaatgccaactaaactcctccctttccttcctaatttcccttcttgcatccttcctataacttgatgcatgtggtttggttcctctctggtggctctttgggctggtattggtggctttccttgtggcagaggatgtctcaaacttcagatgggaggaaagagagcaggactcacaggttggaagagaatcacctgggaaaataccagaaaatgagggccgctttgagtcccccagagatgtcatcagagctcctctgtcctgcttctgaatgtgctgatcatttgaggaataaaattatttttcccc

SEQ ID NO: 1806 - protein, 255 aa, Homo sapiens
MVIALLGVWTSVAVVWFDLVDYEEVLGKLGIYDADGDGDFDVDDAKVLLGLKERSTSEPAVPPEEAEPHTEPEEQVPVEAEPQNIEDEAKEQIQSLLHEMVHAEHVEGEDLQQEDGPTGEPQQEDDEFLMATDVDDRFETLELEVSHEETEHSYHVEETVSQDCNQDMEEMMSEQENPDSSEPVVEDERLHHDTDDVTYQVYEEQAVYEPLENEGIEITEVTVPPEDNPVEDSQVIVEEVSIFPVEEQQEVPPDT

SEQ ID NO: 1807 - protein, 226 aa, Homo sapiens
MPLSQIKKVLDIRETEDCHNAFALLVRPPTEQANVLLSFQMTSDELPKENWLKMLCRHVANTICKADAENLIYTADPESFEVNTKDMDSTLSRASRAIKKTSKKVTRAFSFSKTPKRALRRALMTSHGSVEGRSPSSNDKHVMSRLSSTSSLAITHSVSTSNVIGFTKHVYVQRLNSTGGRSQYSWFQSVRHSAFRASFSEILEGNTDFSNFKKVLSKSSLTFVKN

SEQ ID NO: 1808 - protein, 52 aa, Homo sapiens [sequence omitted]

SEQ ID NO: 1809 - protein, 592 aa, Homo sapiens
MASEIHMTGPMCLIENTNGRLMANPEALKILSAITQPMVVVAIVGLYRTGKSYLMNKLAGKKKGFSLGSTVQSHTKGIWMWCVPHPKKPGHILVLLDTEGLGDVEKGDNQNDSWIFALAVLLSSTFVYNSIGTINQQAMDQLYYVTELTHRIRSKSSPDENENEVEDSADFVSFFPDFVWTLRDFSLDLEADGQPLTPDEYLTYSLKLKKGTSQKDETFNLPRLCIRKFFPKKKCFVFDRPVHRRKLAQLEKLQDEELDPEFVQQVADFCSYIFSNSKTKTLSGGIQVNGPRLESLVLTYVNAISSGDLPCMENAVLALAQIENSAAVQKAIAHYEQQMGQKVQLPTESLQELLDLHRDSEREAIEVFIRSSFKDVDHLFQKELAAQLEKKRDDFCKQNQEASSDRCSGLLQVIFSPLEEEVKAGIYSKPGGYRLFVQKLQDLKKKYYEEPRKGIQAEEILQTYLKSKESMTDAILQTDQTLTEKEKEIEVERVKAESAQASAKMLQEMQRKNEQMMEQKERSYQEHLKQLTEKMENDRVQLLKEQERTLALKLQEQEQLLKEGFQKESRIMKNEIQDLQTKMRRRKACTIS

SEQ ID NO: 1810 - protein, 57 aa, Homo sapiens [sequence omitted]

SEQ ID NO: 1811 - protein, 148 aa, Homo sapiens
MRGSELPLVLLALVLCLAPRGRAVPLPAGGGTVLTKMYPRGNHWAVGHLMGKKSTGESSSVSERGSLKQQLREYIRWEEAARNLLGLIEAKENRNHQPPQPKALGNQQPSWDSEDSSNFKDVGSKGKVGRLSAPGSQREGRNPQLNQQ

SEQ ID NO: 1812 - protein, 474 aa, Homo sapiens
MVQQTNNAENTEALLAGESSDSGAGLELGIASSPTPGSTASTGGKADDPSWCKTPSGHIKRPMNAFMVWSQIERRKIMEQSPDMHNAEISKRLGKRWKLLKDSDKIPFIREAERLRLKHMADYPDYKYRPRKKVKSGNANSSSSAAASSKPGEKGDKVGGSGGGGHGGGGGGGSSNAGGGGGGASGGGANSKPAQKKSCGSKVAGGAGGGVSKPHAKLILAGGGGGGKAAAAAAASFAAEQAGAAALLPLGAAADHHSLYKARTPSASASASSAASASAALAAPGKHLAEKKVKRVYLFGGLGTSSSPVGGVGAGADPSDPLGLYEEEGAGCSPDAPSLSGRSSAASSPAAGRSPADHRGYASLRAASPAPSSAPSHASSSASSHSSSSSSSGSSSSDDEFEDDLLDLNPSSNFESMSLGSFSSSSALDRDLDFNFEPGSGSHFEFPDYCTPEVSEMISGDWLESSISNLVFTY

SEQ ID NO: 1813 - protein, 238 aa, Homo sapiens
MESSAKMESGGAGQQPQPQPQQPFLPPAACFFATAAAAAAAAAAAAAQSAQQQQQQQQQQQQQQAPQLRPAADGQPSGGGHKSAPKQVKRQRSSSPELMRCKRRLNFSGFGYSLPQQQPAAVARRNERERNRVKLVNLGFATLREHVPNGAANKKMSKVETLRSAVEYIRALQQLLDEHDAVSAAFQAGVLSPTISPNYSNDLNSMAGSPVSSYSSDEGSYDPLSPEEQELLDFTNWF

SEQ ID NO: 1814 - protein, 68 aa, Homo sapiens
MVYYPELFVWVSQEPFPNKDMEGRLPKGRLPVPKEVNRKKNDETNAASLTPLGSSELRSPRISYLHFF

SEQ ID NO: 1815 - protein, 572 aa, Homo sapiens
MSYQGKKSIPHITSDRLLIKGGRIINDDQSLYADVYLEDGLIKQIGENLIVPGGVKTIEANGRMVIPGGIDVNTYLQKPSQGMTAADDFFQGTRAALVGGTTMIIDHVVPEPGSSLLTSFEKWHEAADTKSCCDYSLHVDITSWYDGVREELEVLVQDKGVNSFQVYMAYKDVYQMSDSQLYEAFTFLKGLGAVILVHAENGDLIAQEQKRILEMGITGPEGHALSRPEELEAEAVFRAITIAGRINCPVYITKVMSKSAADIIALARKKGPLVFGEPIAASLGTDGTHYWSKNWAKAAAFVTSPPLSPDPTTPDYLTSLLACGDLQVTGSGHCPYSTAQKAVGKDNFTLIPEGVNGIEERMTVVWDKAVATGKMDENQFVAVTSTNAAKIFNLYPRKGRIAVGSDADVVIWDPDKLKTITAKSHKSAVEYNIFEGMECHGSPLVVISQGKIVFEDGNINVNKGMGRFIPRKAFPEHLYQRVKIRNKVFGLQGVSRGMYDGPVYEVPATPKYATPAPSAKSSPSKHQPPPIRNLHQSNFSLSGAQIDDNNPRRTGHRIVAPPGGRSNITSLG

SEQ ID NO: 1816 - protein, 325 aa, Homo sapiens
MTERRRDELSEEINNLREKVMKQSEENNNLQSQVQKLTEENTTLREQVEPTPEDEDDDIELRGAAAAAAPPPPIEEECPEDLPEKFDGNPDMLAPFMAQCQIFMEKSTRDFSVDRVRVCFVTSMMTGRAARWASAKLERSHYLMHNYPAFMMEMKHVFEDPQRREVAKRKIRRLRQGMGSVIDYSNAFQMIAQDLDWNEPALIDQYHEGLSDHIQEELSHLEVAKSLSALIGQCIHIERRLARAAAARKPRSPPRALVLPHIASHHQVDPTEPVGGARMRLTQEEKERRRKLNLCLYCGTGGHYADNCPAKASKSSPAGNSPAPL

SEQ ID NO: 1817 - protein, 357 aa, Homo sapiens
MLQIHLPGRHTLFVRAMIDSGASGNFIDHEYVAQNGIPLRIKDWPILVEAIDGRPIASGPVVHETHDLIVDLGDHREVLSFDVTQSPFFPVVLGVRWLSTHDPNITWSTRSIVFDSEYCRYHCRMYSPIPPSLPPPAPQPPLYYPVDGYRVYQPVRYYYVQNVYTPVDEHVYPDHRLVDPHIEMIPGAHSIPSGHVYSLSEPEMAALRDFVARNVKDGLITPTIAPNGAQVLQVKRGWKLQVSYDCRAPNNFTIQNQYPRLSIPNLEDQAHLATYTEFVPQIPGYQTYPTYAAYPTYPVGFAWYPVGRDGQGRSLYVPVMITWNPHWYRQPPVPQYPPPQPPPPPPPPPPPPSYSTL

SEQ ID NO: 1818 - protein, 102 aa, Homo sapiens [sequence omitted]

SEQ ID NO: 1819 - protein, 831 aa, Homo sapiens
MERAGATSRGGQAPGFLLRLHTEGRAEAARVQEQDLRQWGLTGIHLRSYQLEGVNWLAQRFHCQNGCILGDEMGLGKTCQTIALFIYLAGRLNDEGPFLILCPLSVLSNWKEEMQRFAPGLSCVTYAGDKEERACLQQDLKQESRFHVLLTTYEICLKDASFLKSFPWSVLVVDEAHRLKNQSSLLHKTLSEFSVVFSLLLTGTPIQNSLQELYSLLSFVEPDLFSKEEVGDFIQRYQDIEKESESASELHKLLQPFLLRRVKAEVATELPKKTEVVIYHGMSALQKKYYKAILMKDLDAFENETAKKVKLQNILSQLRKCVDHPYLFDGVEPEPFEVGDHLTEASGKLHLLDKLLAFLYSGGHRVLLFSQMTQMLDILQDYMDYRGYSYERVDGSVRGEERHLAIKNFGQQPIFVFLLSTRAGGVGMNLTAADTVIFVDSDFNPQNDLQAAARAHRIGQNKSVKVIRLIGRDTVEEIVYRKAASKLQLTNMIIEGGHFTLGAQKPAADADLQLSEILKFGLDKLLASEGSTMDEIDLESILGETKDGQWVSDALPAAEGGSRDQEEGKNHMYLFEGKDYSKEPSKEDRKSFEQLVNLQKTLLEKASQEGRSLRNKGSVLIPGLVEGSTKRKRVLSPEELEDRQKKRQEAAAKRRRLIEEKKRQKEEAEHKKKVAWWESNNYQSFCLPSEESEPEDLENGEESSAELDYQDPDATSLKYVSGDVTHPQAGAEDALIVHCVDDSGHWGRGGLFTALEKRSAEPRKIYELAGKMKDLSLGGVLLFPVDDKESRNKGQDLLALIVAQHRDRSNVLSGIKMAALEEGLKKIFLAA

SEQ ID NO: 1820 - protein, 212 aa, Homo sapiens
MLNKVLSRLGVAGQWRFVDVLGLEEESLGSVPAPACALLLLFPLTAQHENFRKKQIEELKGQEVSPKVYFMKQTIGNSCGTIGLIHAVANNQDKLGFEDGSVLKQFLSETEKMSPEDRAKCFEKNEAIQAAHDAVAQEGQCRVDDKVNFHFILFNNVDGHLYELDGRMPFPVNHGASSEDTLLKDAAKVCREFTEREQGEVRFSAVALCKAA

SEQ ID NO: 1821 - protein, 323 aa, Homo sapiens [sequence omitted]

SEQ ID NO: 1822 - protein, 141 aa, Homo sapiens
MGFQKFSPFLALSILVLLQAGSLHAAPFRSALESSPADPATLSEDEARLLLAALVQDYVQMKASELEQEQEREGSSLDSPRSKRCGNLSTCMLGTYTQDFNKFHTFPQTAIGVGAPGKKRDMSSDLERDHRPHVSMPQNAN

SEQ ID NO: 1823 - DNA, 6188 bp, Homo sapiens
caacaacaacaactccaagcacaccggccataagagtgcgtgtgtccccaacatgaccgaacgaagaagggacgagctctctgaagagatcaacaacttaagagagaaggtcatgaagcagtcggaggagaacaacaacctgcagagccaggtgcagaagctcacagaggagaacaccacccttcgagagcaagtggaacccacccctgaggatgaggatgatgacatcgagctccgcggtgctgcagcagctgctgccccaccccctccaatagaggaagagtgcccagaagacctcccagagaagttcgatggcaacccagacatgctggctcctttcatggcccagtgccagatcttcatggaaaagagcaccagggatttctcagttgatcgtgtccgtgtctgcttcgtgacaagcatgatgaccggccgtgctgcccgttgggcctcagcaaagctggagcgctcccactacctgatgcacaactacccagctttcatgatggaaatgaagcatgtctttgaagaccctcagaggcgagaggttgccaaacgcaagatcagacgcctgcgccaaggcatggggtctgtcatcgactactccaatgctttccagatgattgcccaggacctggattggaacgagcctgcgctgattgaccagtaccacgagggcctcagcgaccacattcaggaggagctctcccacctcgaggtcgccaagtcgctgtctgctctgattgggcagtgcattcacattgagagaaggctggccagggctgctgcagctcgcaagccacgctcgccaccccgggcgctggtgttgcctcacattgcaagccaccaccaggtagatccaaccgagccggtgggaggtgcccgcatgcgcctgacgcaggaagaaaaagaaagacgcagaaagctgaacctgtgcctctactgtggaacaggaggtcactacgctgacaattgtcctgccaaggcctcaaagtcttcgccggcgggaaactccccggccccgctgtagagggaccttcagcgaccgggccagaaataataaggtccccacaagatgatgcctcatctccacacttgcaagtgatgctccagattcatcttccgggcagacacaccctgttcgtccgagccatgatcgattctggtgcttctggcaacttcattgatcacgaatatgttgctcaaaatggaattcctctaagaatcaaggactggccaatacttgtggaagcaattgatgggcgccccatagcatcgggcccagttgtccacgaaactcacgacctgatagttgacctgggagatcaccgagaggtgctgtcatttgatgtgactcagtctccattcttccctgtcgtcctaggggttcgctggctgagcacacatgatcccaatatcacatggagcactcgatctatcgtctttgattctgaatactgccgctaccactgccggatgtattctccaataccaccatcgctcccaccaccagcaccacaaccgccactctattatccagtagatggatacagagtttaccaaccagtgaggtattactatgtccagaatgtgtacactccagtagatgagcacgtctacccagatcaccgcctggttgaccctcacatagaaatgatacctggagcacacagtattcccagtggacatgtgtattcactgtccgaacctgaaatggcagctcttcgagattttgtggcaagaaatgtaaaagatgggctaattactccaacgattgcacctaatggagcccaagttctccaggtgaagagggggtggaaactgcaagtttcttatgattgccgagctccaaacaattttactatccagaatcagtatcctcgcctatctattccaaatttagaagaccaagcacacctggcaacgtacactgaattcgtacctcaaatacctggataccaaacataccccacatatgccgcgtacccgacctacccagtaggattcgcctggtacccagtgggacgagacggacaaggaagatcactatatgtacctgtgatgatcacttggaatccacactggtaccgccagcctccggtaccacagtacccgccgccacagccgccgcctccaccaccaccaccgccgccgcctccatcttacagtaccctgtaaatacctgtcatgtccttcaggatctctgccctcaaaatttattcctgttcagcttctcaatcagtgactgtgtgctaaattttaggctactgtatcttcaggccacctgaggcacatcctctctgaaacggctatggaaggttagggccactctggactggcacacatcctaaagcaccaaaagaccttcaacattttctgagagcaacagagtatttgccaataaatgatctctcatttttccaccttgactgccaatctaactaaaataattaataagtttactttccagccagtcctggaagtctgggttttacctgccaaaacctccatcaccatctaaattataggctgccaaatttgctgtttaacatttacagagaagctgatacaaacgcaggaaatgctgatttctttatggagggggagacgaggaggaggaggacatgacttttcttgcggtttcggtaccctctttttaaatcactggaggactgaggccttattaaggaagccaaaattatcggtgcagtgtggaaaggcttccgtgatcctctcgctgcacccttagaaacttcaccgtcttcaaactccatttccatggttctgttaattctcaaggagcagcaactcgactggttctcccaggagcaggaaaaacccttgtgacatgaaacatctcaggcctgaaaagaaagtgctctctcagatggactcttgcatgttaagactatgtcttcacatcatggtgcaaatcacatgtacccaatgactccggctttgacacaacaccttaccatcatcatgccatgatggcttccacaaagcattaaacctggtaaccagagattactggtggctccagcgttgttagatgttcatgaaatgtgaccacctctcaatcacctttgagggctaaagagtagcacatcaaaaggactccaaaatcccatacccaactcttaagagatttgtcctggtacttcagaaagaattttcatgagtgttcttaattggctggaaaagcaccagctgacgttttggaagaatctatccatgtgtctgcctccatatgcatctgggcatttcatcttcagtcccctcattagactgtagcattaggatgtgtggagagaggagaaatgatttagcacccagattcacactcctatgcctggaagggggacatctttgaagaagaggaattagggctgtggacactgtcttgaggatgtggacttccttagtgagctccacattacttgatggtaaccacttcaaaaggatcagaatccacgtaatgaaaaaggtccctctagaggatggagctgatgtgaagctgccaatggatgaaaagcctcagaaagcaactcaaaggactcaaagcaacggacaacacaagagttgtcttcagcccagtgacacctctgatgtcccctggaagctttgtgctaacctgggactgcctgacttcctttagcctggtcccttgctactaccttgaactgttttatctaacctctctttttctgtttaattctttgctactgccattgaccctgctgcaggatttgtgtcattttcctgcctggttgctgagactccattttgctgccacacacagagatgtaagaggcaggctttaattgccaaagcacagtttgagcagtagaaaacaacatggtgtatatctcaaattgcctgacatgaagaggagtctaacggtgaagtttcacttttcatcagcatcatctttcacatgttcattatcatccgctcttattcttgcatgtttaaacacttaaaatttttagtataatttttagtgtgttttgaagtggtgactaggctttcaaaaacttccattgaattacaaagcactatccagttcttattgttaaactaagtaaaaatgataagtaacatagtgtaaaatattcctttactgtgaacttcttacaatgctgtgaatgagaggctcctcagaactggagcatttgtataataattcatcctgttcatcttcaattttaacatcatatataatttcaattctatcaattgggcctttaaaaatcatataaaaggatataaaatttgaaaagagaaacctaattggctatttaatccaaaacaacttttttttttccttcaatggaatcagaaagcttgtcaatcactcatgtgttttagagtaattacttttaaaatggtgcatttgtgcttctgaactattttgaagagtcacttctgtttacctcaagtatcaattcatcctccatacatttgaattcaagttgttttttgtcaaatttacagttgtcaattgatcttcaagctgcagggtgcctagaaatgggccgttgtctgtagccctggcatgtgcacacggacatttgccaccactgcaagcaaaagtctggagaagttcaccaacgacaagaacgattagggaaaatatgctgctgtgggttaacaactcagaaagtccctgatccacatttggctgtttactaaagcttgtgattaactttttggcagtgtgtactatgctctattgctatatatgctatctataaatgtagatgttaaggataagtaattctaaatttattattctatagttttgaagtttggttaagtttcctttcactcaattgatttattttgttgttaatcaaatttatgttaattggatcctttaaattttttttggcattttccaacaaaaatggctttattcataagaaaggaaaaaaatcaatggaatttgatatctaaagaagttagaaagggagcaaaataaaaaacataaaggagatagatgaattagtaagcaaatcagtagtcgagtttttcaaactggcaaaattaattaattgacttttagcccaaatttacattgttaattaaatcaagaaggaagaagatctaagagctcccattgataggcaagcctagagagaactagctaaatttatcatgctaggatattgaaacacagaaagtttacatacatttatgaagggtcaatttagtttggacagtgaggtatttgtcttagtggaaaaaaggagaattagtctgatcaaatcgtgaagtaatacagtgaacttgcaggtgcacaaaataagagggccacatctatatggtgcagtctggaattctgtttaagtttgtaggtacctcttggacttctgaattgatccagttgtcatccaccacagacatctcacatcagatacagacagttccaagattgacaacagagaacaacctgctggaaagacctgggcagaaatggagagccctgcgggaaccatgctacattttcatctaaagagagaatgcacatctgatgagactgaaagttctttgttgttttagattgtagaatggtattgaattggtctgtggaaaattgcattgcttttatttctttgtgtaatcaagtttaagtaataggggatatataatcataagcattttagggtgggagggactattaagtaattttaagtgggtggggttatttagaatgttagaataatattatgtattagatatcgctataagtggacatgcgtacttacttgtaaccctttaccctataattgctatccttaaagatttcaaataaactcggagggaactgcagggagaccaacttatttagagcgaattggacatggataaaaaccccagtgggagaaagttcaaaggtgattagattaataatttaatagaggatgagtgacctctgataaattactgctagaatgaacttgtcaatgatggatggtaaattttcatggaagttataaaagtgataaataaaaacccttgcttttacccctgtcagtagccctcctcctaccactgaaccccattgcccctacccctccttctaactttattgctgtattctcttcactctatatttctctctatttgctaatattgcattgctgttacaataaaaattcaataaagatttagtggttaagtgc

SEQ ID NO: 1824 - DNA, 866 bp, Homo sapiens
ggcagagccacaggaaggatgaggaagaccaggctctgggggctgctgtggatgctctttgtctcagaactccgagctgcaactaaattaactgaggaaaagtatgaactgaaagaggggcagaccctggatgtgaaatgtgactacacgctagagaagtttgccagcagccagaaagcttggcagataataagggacggagagatgcccaagaccctggcatgcacagagaggccttcaaagaattcccatccagtccaagtggggaggatcatactagaagactaccatgatcatggtttactgcgcgtccgaatggtcaaccttcaagtggaagattctggactgtatcagtgtgtgatctaccagcctcccaaggagcctcacatgctgttcgatcgcatccgcttggtggtgaccaagggtttttcagggacccctggctccaatgagaattctacccagaatgtgtataagattcctcctaccaccactaaggccttgtgcccactctataccagccccagaactgtgacccaagctccacccaagtcaactgccgatgtctccactcctgactctgaaatcaaccttacaaatgtgacagatatcatcagggttccggtgttcaacattgtcattctcctggctggtggattcctgagtaagagcctggtcttctctgtcctgtttgctgtcacgctgaggtcatttgtaccctaggcccacgaacccacgagaatgtcctctgacttccagccacatccatctggcagttgtgccaagggaggagggaggaggtaaaaggcagggagttaataacatgaattaaatctgtaatcaccrgctaaaaaaaaaaaaaaaaa

SEQ ID NO: 1825 - protein, 234 aa, Homo sapiens
MRKTRLWGLLWMLFVSELRAATKLTEEKYELKEGQTLDVKCDYTLEKFASSQKAWQIIRDGEMPKTLACTERPSKNSHPVQVGRIILEDYHDHGLLRVRMVNLQVEDSGLYQCVIYQPPKEPHMLFDRIRLVVTKGFSGTPGSNENSTQNVYKIPPTTTKALCPLYTSPRTVTQAPPKSTADVSTPDSEINLTNVTDIIRVPVFNIVILLAGGFLSKSLVFSVLFAVTLRSFVP

SEQ ID NO: 1826 - DNA, 192 bp, Homo sapiens
atgcggtgccacgcccatggaccttcttgtctcgtcacggccataactagggaggaaggagggccgaggagtggaggggctcaggcgaagctggggtgctgttgggggtatccgagtcccagaagcacctggaaccccgacagaagattctggactccccagacgggaccaggagagggacggcatgagcga

SEQ ID NO: 1827 - DNA, 288 bp, Homo sapiens
cacacacaaacacagaaccacacagccagtcccaggagcccagtaatggagagccccaaaaagaagaaccagcagctgaaagtcgggatcctacacctgggcagcagacagaagaagatcaggatacagctgagatcccagtgcgcgacatggaaggtgatctgcaagagctgcatcagtcaaacaccggggataaatctggatttgggttccggcgtcaaggtgaagataatacctaaagaggaacactgtaaaatgccagaagcaggtgaagagcaaccacaagtt

SEQ ID NO: 1828 - DNA, 141 bp, Homo sapiens
cacacacaaacacagaaccacacagccagtcccaggagcccagtaatggagagccccaaaaagaagaaccagcagctgaaagtcgggatcctacacctgggcagcagacagaagaagatcaggatacagctgagatcccag

SEQ ID NO: 1829 - DNA, 111 bp, Homo sapiens
gtgctgggaagggaaatgcgcgacatggaaggtgatctgcaagagctgcatcagtcaaacaccggggataaatctggatttgggttccggcgtcaaggtgaagataatacc

SEQ ID NO: 1830 - protein, 64 aa, Homo sapiens
MRCHAHGPSCLVTAITREEGGPRSGGAQAKLGCCWGYPSPRSTWNPDRRFWTPQTGPGEGRHER

SEQ ID NO: 1831 - protein, 96 aa, Homo sapiens
HTQTQNHTASPRSPVMESPKKKNQQLKVGILHLGSRQKKIRIQLRSQCATWKVICKSCISQTPGINLDLGSGVKVKIIPKEEHCKMPEAGEEQPQV

SEQ ID NO: 1832 - protein, 47 aa, Homo sapiens
HTQTQNHTASPRSPVMESPKKKNQQLKVGILHLGSRQKKIRIQLRSQ

SEQ ID NO: 1833 - protein, 37 aa, Homo sapiens
VLGREMRDMEGDLQELHQSNTGDKSGFGFRRQGEDNT

SEQ ID NO: 1834 - protein, 20 aa, Homo sapiens
MAKGDPKKPKGKTSAYAFFV

SEQ ID NO: 1835 - protein, 20 aa, Homo sapiens
PKGKTSAYAFFVQTCREEHK

SEQ ID NO: 1836 - protein, 20 aa, Homo sapiens
AFFVQTCREEHKKKNPEVPV

SEQ ID NO: 1837 - protein, 20 aa, Homo sapiens
EEHKKKNPEVPVNFAEFSKK

SEQ ID NO: 1838 - protein, 20 aa, Homo sapiens
EVPVNFAEFSKKCSERWKTV

SEQ ID NO: 1839 - protein, 20 aa, Homo sapiens
FSKKCSERWKTVSGKEKSKF

SEQ ID NO: 1840 - protein, 20 aa, Homo sapiens
WKTVSGKEKSKFDEMAKADK

SEQ ID NO: 1841 - protein, 20 aa, Homo sapiens
KSKFDEMAKADKVRYDREMK

SEQ ID NO: 1842 - protein, 20 aa, Homo sapiens
KADKVRYDREMKDYGPAKGG

SEQ ID NO: 1843 - protein, 20 aa, Homo sapiens
REMKDYGPAKGGKKKKDPNA

SEQ ID NO: 1844 - protein, 20 aa, Homo sapiens
AKGGKKKKDPNAPKRPPSGF

SEQ ID NO: 1845 - protein, 20 aa, Homo sapiens
DPNAPKRPPSGFFLFCSEFR

SEQ ID NO: 1846 - protein, 20 aa, Homo sapiens
PSGFFLFCSEFRPKIKSTNP

SEQ ID NO: 1847 - protein, 20 aa, Homo sapiens
SEFRPKIKSTNPGISIGDVA

SEQ ID NO: 1848 - protein, 20 aa, Homo sapiens
STNPGISIGDVAKKLGEMWN

SEQ ID NO: 1849 - protein, 20 aa, Homo sapiens
GDVAKKLGEMWNNLNDSEKQ

SEQ ID NO: 1850 - protein, 20 aa, Homo sapiens
EMWNNLNDSEKQPYITKAAK

SEQ ID NO: 1851 - protein, 20 aa, Homo sapiens
SEKQPYITKAAKLKEKYEKD

SEQ ID NO: 1852 - protein, 20 aa, Homo sapiens
KAAKLKEKYEKDVADYKSKG

SEQ ID NO: 1853 - protein, 20 aa, Homo sapiens
YEKDVADYKSKGKFDGAKGP

SEQ ID NO: 1854 - protein, 20 aa, Homo sapiens
KSKGKFDGAKGPAKVARKKV

SEQ ID NO: 1855 - protein, 20 aa, Homo sapiens
AKGPAKVARKKVEEEDEEEE

SEQ ID NO: 1856 - protein, 20 aa, Homo sapiens
RKKVEEEDEEQEEEEEEEEE

SEQ ID NO: 1857 - DNA, 28 bp, Artificial Sequence
  PCR primer
agtgcgaattcgggctgcgtgcaggagg

SEQ ID NO: 1858 - DNA, 32 bp, Artificial Sequence
  PCR primer
ggactcgagctactgcaagtctggtgtggatg

SEQ ID NO: 1859 - DNA, 33 bp, Artificial Sequence
  PCR primer
agatgaattcacgcgtccgcgccgcgcggcgca

SEQ ID NO: 1860 - DNA, 31 bp, Artificial Sequence
  PCR primer
agttctcgagtcacctccctgggcccctttg

SEQ ID NO: 1861 - DNA, 945 bp, Homo sapiens
atgcatcaccatcaccatcacacggccgcgtccgataacttccagctgtcccagggtgggcagggattcgccattccgatcgggcaggcgatggcgatcgcgggccagatcaagcttcccaccgttcatatcgggcctaccgccttcctcggcttgggtgttgtcgacaacaacggcaacggcgcacgagtccaacgcgtggtcgggagcgctccggcggcaagtctcggcatctccaccggcgacgtgatcaccgcggtcgacggcgctccgatcaactcggccaccgcgatggcggacgcgcttaacgggcatcatcccggtgacgtcatctcggtgacctggcaaaccaagtcgggcggcacgcgtacagggaacgtgacattggccgagggacccccggccgaattcacgcgtccgcgccgcgcggcgcaggggaggcgagaggcgccccccggtggagagcctgagccccgcgcaagtctggcggcacctggcgagcggagccggagtcgggctggggaccgcggggttgaggccggaccgcggcggggtcgggggagaaacgcgcgctgccctggcacgggccccaaccccccggccgcgcggaatggtatggcccggccggagttaaggccggggggaggcggcgagtcccgcggcggcggcgacgatggggctgcgtgcaggaggaacgctgggcagggccggcgcgggtcggggggcgcccgaggggcccgggccgagcggcggcgcgcagggcggcagcatccactcgggccgcatcgccgcggtgcacaacgtgccgctgagcgtgctcatccggccgctgccgtccgtgttggaccccgccaaggtgcagagcctcgtggacacgatccgggaggacccagacagcgtgccccccatcgatgtcctctggatcaaaggggcccagggaggtga

SEQ ID NO: 1862 - DNA, 822 bp, Homo sapiens
atgcatcaccatcaccatcacacggccgcgtccgataacttccagctgtcccagggtgggcagggattcgccattccgatcgggcaggcgatggcgatcgcgggccagatcaagcttcccaccgttcatatcgggcctaccgccttcctcggcttgggtgttgtcgacaacaacggcaacggcgcacgagtccaacgcgtggtcgggagcgctccggcggcaagtctcggcatctccaccggcgacgtgatcaccgcggtcgacggcgctccgatcaactcggccaccgcgatggcggacgcgcttaacgggcatcatcccggtgacgtcatctcggtgacctggcaaaccaagtcgggcggcacgcgtacagggaacgtgacattggccgagggacccccggccgaattcgggctgcgtgcaggaggaacgctgggcagggccggcgcgggtcggggggcgcccgaggggcccgggccgagcggcggcgcgcagggcggcagcatccactcgggccgcatcgccgcggtgcacaacgtgccgctgagcgtgctcatccggccgctgccgtccgtgttggaccccgccaaggtgcagagcctcgtggacacgatccgggaggacccagacagcgtgccccccatcgatgtcctctggatcaaaggggcccagggaggtgactacttctactcctttgggggctgccaccgctacgcggcctaccagcaactgcagcgagagaccatccccgccaagcttgtccagtccactctctcagacctaagggtgtacctgggagcatccacaccagacttgcagtag

SEQ ID NO: 1863 - protein, 314 aa, Homo sapiens [sequence omitted]

SEQ ID NO: 1864 - protein, 273 aa, Homo sapiens
MHHHHHHTAASDNFQLSQGGQGFAIPIGQAMAIAGQIKLPTVHIGPTAFLGLGVVDNNGNGARVQRVVGSAPAASLGISTGDVITAVDGAPINSATAMADALNGHHPGDVISVTWQTKSGGTRTGNVTLAEGPPAEFGLRAGGTLGRAGAGRGAPEGPGPSGGAQGGSIHSGRIAAVHNVPLSVLIRPLPSVLDPAKVQSLVDTIREDPDSVPPIDVLWIKGAQGGDYFYSFGGCHRYAAYQQLQRETIPAKLVQSTLSDLRVYLGASTPDLQ

SEQ ID NO: 1865 - DNA, 790 bp, Homo sapiens
ctgattccgcgactccttggccgccgctgcgcatggaaagctctgccaagatggagagcggcggcgccggccagcagccccagccgcagccccagcagcccttcctgccgcccgcagcctgtttctttgccacggccgcagccgcggcggccgcagccgccgcagcggcagcgcagagcgcgcagcagcagcagcagcagcagcagcagcagcagcaggcgccgcagctgagaccggcggccgacggccagccctcagggggcggtcacaagtcagcgcccaagcaagtcaagcgacagcgctcgtcttcgcccgaactgatgcgctgcaaacgccggctcaacttcagcggctttggctacagcctgccgcagcagcagccggccgccgtggcgcgccgcaacgagcgcgagcgcaaccgcgtcaagttggtcaacctgggctttgccacccttcgggagcacgtccccaacggcgcggccaacaagaagatgagtaaggtggagacactgcgctcggcggtcgagtacatccgcgcgctgcagcagctgctggacgagcatgacgcggtgagcgccgccttccaggcaggcgtcctgtcgcccaccatctcccccaactactccaacgacttgaactccatggccggctcgccggtctcatcctactcgtcggacgagggctcttacgacccgctcagccccgaggagcaggagcttctcgacttcaccaactggttctgaggggctcggcctggtcaggccctggtgcgaatggactttggaagcag

SEQ ID NO: 1866 - DNA, 784 bp, Homo sapiens
ccgcgactccttggccgccgctgcgcatggaaagctctgccaagatggagagcggcggcgccggccagcagccccagccgcagccccagcagcccttcctgccgcccgcagcctgtttctttgccacggccgcagccgcggcggccgcagccgccgcagcggcagcgcagagcgcgcagcagcagcagcagcagcagcagcagcagcagcaggcgccgcagctgagaccggcggccgacggccagccctcagggggcggtcacaagtcagcgcccaagcaagtcaagcgacagcgctcgtcttcgcccgaactgatgcgctgcaaacgccggctcaacttcagcggctttggctacagcctgccgcagcagcagccggccgccgtggcgcgccgcaacgagcgcgagcgcaaccgcgtcaagttggtcaacctgggctttgccacccttcgggagcacgtccccaacggcgcggccaacaagaagatgagtaaggtggagacactgcgctcggcggtcgagtacatccgcgcgctgcagcagctgctggacgagcatgacgcggtgagcgccgccttccaggcaggcgtcctgtcgcccaccatctcccccaactactccaacgacttgaactccatggccggctcgccggtctcatcctactcgtcggacgagggctcttacgacccgctcagccccgaggagcaggagcttctcgacttcaccaactggttctgaggggctcggcctggtcaggccctggtgcgaatggactttggaagcag

SEQ ID NO: 1867 - DNA, 789 bp, Homo sapiens
ttccgcgactccttggccgccgctgcgcatggaaagctctgccaagatggagagcggcggcgccggccagcagccccagccgcagccccagcagcccttcctgccgcccgcagcctgtttctttgccacggccgcagccgcggcggccgcagccgccgcagcggcagcgcagagcgcgcagcagcagcagcagcagcagcagcagcagcagcagcaggcgccgcagctgagaccggcggccgacggccagccctcagggggcggtcacaagtcagcgcccaagcaagtcaagcgacagcgctcgtcttcgcccgaactgatgcgctgcaaacgccggctcaacttcagcggctttggctacagcctgccgcagcagcagccggccgccgtggcgcgccgcaacgagcgcgagcgcaaccgcgtcaagttggtcaacctgggctttgccacccttcgggagcacgtccccaacggcgcggccaacaagaagatgagtaaggtggagacactgcgctcggcggtcgagtacatccgcgcgctgcagcagctgctggacgagcatgacgcggtgagcgccgccttccaggcaggcgtcctgtcgcccaccatctcccccaactactccaacgacttgaactccatggccggctcgccggtctcatcctactcgtcggacgagggctcttacgacccgctcagccccgaggagcaggagcttctcgacttcaccaactggttctgaggggctcggcctggtcaggccctggtgcgaatggactttggaagcag

SEQ ID NO: 1868 - DNA, 785 bp, Homo sapiens
tctgattccgcgactccttggccgccgctgcgcatggaaagctctgccaagatggagagcggcggcgccggccagcagccccagccgcagccccagcagcccttcctgccgcccgcagcctgtttctttgccacggccgcagccgcggcggccgcagccgccgcagcggcagcgcagagcgcgcagcagcagcagcagcagcagcagcagcaggcgccgcagctgagaccggcggccgacggccagccctcagggggcggtcacaagtcagcgcccaagcaagtcaagcgacagcgctcgtcttcgcccgaactgatgcgctgcaaacgccggctcaacttcagcggctttggctacagcctgccgcagcagcagccggccgccgtggcgcgccgcaacgagcgcgagcgcaaccgcgtcaagttggtcaacctgggctttgccacccttcgggagcacgtccccaacggcgcggccaacaagaagatgagtaaggtggagacactgcgctcggcggtcgagtacatccgcgcgctgcagcagctgctggacgagcatgacgcggtgagcgccgccttccaggcaggcgtcctgtcgcccaccatctcccccaactactccaacgacttgaactccatggccggctcgccggtctcatcctactcgtcggacgagggctcttacgacccgctcagccccgaggagcaggagcttctcgacttcaccaactggttctgaggggctcggcctggtcaggccctggtgcgaatggactttggaagcag

SEQ ID NO: 1869 - protein, 236 aa, Homo sapiens
MESSAKMESGGAGQQPQPQPQQPFLPPAACFFATAAAAAAAAAAAAAQSAQQQQQQQQQQQQAPQLRPAADGQPSGGGHKSAPKQVKRQRSSSPELMRCKRRLNFSGFGYSLPQQQPAAVARRNERERNRVKLVNLGFATLREHVPNGAANKKMSKVETLRSAVEYIRALQQLLDEHDAVSAAFQAGVLSPTISPNYSNDLNSMAGSPVSSYSSDEGSYDPLSPEEQELLDFTNWF

SEQ ID NO: 1870 - protein, 236 aa, Homo sapiens; identical to SEQ ID NO: 1869

SEQ ID NO: 1871 - protein, 237 aa, Homo sapiens [sequence omitted]

SEQ ID NO: 1872 - protein, 234 aa, Homo sapiens
MESSAKMESGGAGQQPQPQPQQPFLPPAACFFATAAAAAAAAAAAAAQSAQQQQQQQQQQAPQLRPAADGQPSGGGHKSAPKQVKRQRSSSPELMRCKRRLNFSGFGYSLPQQQPAAVARRNERERNRVKLVNLGFATLREHVPNGAANKKMSKVETLRSAVEYIRALQQLLDEHDAVSAAFQAGVLSPTISPNYSNDLNSMAGSPVSSYSSDEGSYDPLSPEEQELLDFTNWF

SEQ ID NO: 1873 - DNA, 1353 bp, Homo sapiens
gcagcatgtaacctggcctgcatccaggaaatagaggacttcggatccttctaaccctaccacccaactggccccagtacattcattctctcaggaaaaaaaacaaggtccccacagcaaagaaaaggaataggatcaagagatacgtggctgctggcagagcaagcatgaattcgatgacttcagcagttccggtggccaattctgtgttggtggtggcaccccacaatggttatcctgtgaccccaggaattatgtctcacgtgcccctgtatccaaacagccagccgcaagtccacctagttcctgggaacccacctagtttggtgtcgaatgtgaatgggcagcctgtgcagaaagctctgaaagaaggcaaaaccttgggggccatccagatcatcattggcctggctcacatcggcctcggctccatcatggcgacggttctcgtaggggaatacctgtctatttcattctacggaggctttcccttctggggaggcttgtggtttatcatttcagaatctctctccgtggcagcagaaaatcagccatattcttattgcctgctgtctggcagtttgggcttgaacatcgtcagtgcaatctgctctgcagttggagtcatactcttcatcacagatctaagtattccccacccatatgcctaccccgactattatccttacgcctggggtgtgaaccctggaatggcgatttctggcgtgctgctggtcttctgcctcctggagtttggcatcgcatgcgcatcttcccactttggctgccagttggtctgctgtcaatcaagcaatgtgagtgtcatctatccaaacatctatgcagcaaacccagtgatcaccccagaaccggtgacctcaccaccaagttattccagtgagatccaagcaaataagtaaggctacagattctggaagcatctttcactgggaccaaaagaagtcctcctccctttctgggcttccataacccaggtcgttcctgttctgacagctgaggaaacgtctctcccactgtttgtactctcaccttcattcttcaattcagtctaggaaaccatgctgtttctctatcaagaagaagacagagattttaaacagatgttaaccaagagggactccctagggcacatgcatcagcacatatgtgggcatccagcctctggggccttggcacacacacattcgtgtgctctgctgcatgtgagcttgtgggttaaaggaacaaatatttagacattcaatcttcactctttcaattgtgcattcatttaataaatagatactgagcattcaaaaaaaaaaaaaaaaaaaaaaaaaaaaaaaaaaaaaa

SEQ ID NO: 1874 - protein, 250 aa, Homo sapiens
MNSMTSAVPVANSVLVVAPHNGYPVTPGIMSHVPLYPNSQPQVHLVPGNPPSLVSNVNGQPVQKALKEGKTLGAIQIIIGLAHIGLGSIMATVLVGEYLSISFYGGFPFWGGLWFIISESLSVAAENQPYSYCLLSGSLGLNIVSAICSAVGVILFITDLSIPHPYAYPDYYPYAWGVNPGMAISGVLLVFCLLEFGIACASSHFGCQLVCCQSSNVSVIYPNIYAANPVITPEPVTSPPSYSSEIQANK

SEQ ID NO: 1875 - DNA, 1155 bp, Homo sapiens
atgcatcaccatcaccatcacacggccgcgtccgataacttccagctgtcccagggtgggcagggattcgccattccgatcgggcaggcgatggcgatcgcgggccagatcaagcttcccaccgttcatatcgggcctaccgccttcctcggcttgggtgttgtcgacaacaacggcaacggcgcacgagtccaacgcgtggtcgggagcgctccggcggcaagtctcggcatctccaccggcgacgtgatcaccgcggtcgacggcgctccgatcaactcggccaccgcgatggcggacgcgcttaacgggcatcatcccggtgacgtcatctcggtgacctggcaaaccaagtcgggcggcacgcgtacagggaacgtgacattggccgagggacccccggccgaattcatgacttcagcagttccggtggccaattctgtgttggtggtggcaccccacaatggttatcctgtgaccccaggaattatgtctcacgtgcccctgtatccaaacagccagccgcaagtccacctagttcctgggaacccacctagtttggtgtcgaatgtgaatgggcagcctgtgcagaaagctctgaaagaaggcaaaaccttgggggccatccagatcatcattggcctggctcacatcggcctcggctccatcatggcgacggttctcgtaggggaatacctgtctatttcattctacggaggctttcccttctggggaggcttgtggtttatcatttcagaatctctctccgtggcagcagaaaatcagccatattcttattgcctgctgtctggcagtttgggcttgaacatcgtcagtgcaatctgctctgcagttggagtcatactcttcatcacagatctaagtattccccacccatatgcctaccccgactattatccttacgcctggggtgtgaaccctggaatggcgatttctggcgtgctgctggtcttctgcctcctggagtttggcatcgcatgcgcatcttcccactttggctgccagttggtctgctgtcaatcaagcaatgtgagtgtcatctatccaaacatctatgcagcaaacccagtgatcaccccagaaccggtgacctcaccaccaagttattccagtgagatccaagcaaataagtaa

SEQ ID NO: 1876 - protein, 384 aa, Homo sapiens [sequence omitted]

SEQ ID NO: 1877 - DNA, 861 bp, Homo sapiens
atgcatcaccatcaccatcacacggccgcgtccgataacttccagctgtcccagggtgggcagggattcgccattccgatcgggcaggcgatggcgatcgcgggccagatcaagcttatgacttcagcagttccggtggccaattctgtgttggtggtggcaccccacaatggttatcctgtgaccccaggaattatgtctcacgtgcccctgtatccaaacagccagccgcaagtccacctagttcctgggaacccacctagtttggtgtcgaatgtgaatgggcagcctgtgcagaaagctctgaaagaaggcaaaaccttgggggccatccagatcatcattggcctggctcacatcggcctcggctccatcatggcgacggttctcgtaggggaatacctgtctatttcattctacggaggctttcccttctggggaggcttgtggtttatcatttcagaatctctctccgtggcagcagaaaatcagccatattcttattgcctgctgtctggcagtttgggcttgaacatcgtcagtgcaatctgctctgcagttggagtcatactcttcatcacagatctaagtattccccacccatatgcctaccccgactattatccttacgcctggggtgtgaaccctggaatggcgatttctggcgtgctgctggtcttctgcctcctggagtttggcatcgcatgcgcatcttcccactttggctgccagttggtctgctgtcaatcaagcaatgtgagtgtcatctatccaaacatctatgcagcaaacccagtgatcaccccagaaccggtgacctcaccaccaagttattccagtgagatccaagcaaataagtaa

SEQ ID NO: 1878 - protein, 286 aa, Homo sapiens
MHHHHHHTAASDNFQLSQGGQGFAIPIGQAMAIAGQIKLMTSAVPVANSVLVVAPHNGYPVTPGIMSHVPLYPNSQPQVHLVPGNPPSLVSNVNGQPVQKALKEGKTLGAIQIIIGLAHIGLGSIMATVLVGEYLSISFYGGFPFWGGLWFIISESLSVAAENQPYSYCLLSGSLGLNIVSAICSAVGVILFITDLSIPHPYAYPDYYPYAWGVNPGMAISGVLLVFCLLEFGIACASSHFGCQLVCCQSSNVSVIYPNIYAANPVITPEPVTSPPSYSSEIQANK

SEQ ID NO: 1879 - DNA, 186 bp, Homo sapiens
atgcatcaccatcaccatcacacggccgcgtccgataacttccagctgtcccagggtgggcagggattcgccattccgatcgggcaggcgatggcgatcgcgggccagatcaagcttctaagtattccccacccatatgcctaccccgactattatccttacgcctggggtgtgaaccctggaatg

SEQ ID NO: 1880 - protein, 62 aa, Homo sapiens
MHHHHHHTAASDNFQLSQGGQGFAIPIGQAMAIAGQIKLLSIPHPYAYPDYYPYAWGVNPGM

SEQ ID NO: 1881 - DNA, 69 bp, Homo sapiens
ctaagtattccccacccatatgcctaccccgactattatccttacgcctggggtgtgaaccctggaatg

SEQ ID NO: 1882 - protein, 23 aa, Homo sapiens
LSIPHPYAYPDYYPYAWGVNPGM

SEQ ID NO: 1883 - DNA, 6799 bp, Homo sapiens
gccacgtaagaagtgtctttcgcctcccgccatgattctgaggcctccccagccatgtgcaactgcgtgtttactgctctgggcccagtgcctccctcgctcaatggagtgacggcatccaactcacaagacaggagactcaacagaatgaccaagtggagaagacgtctaagttctcagcggtctcagccgaatgactgaagaggaaccagggacagggatgactcacatgggaagaggaccccactttgttctgtttgattctaagaggacacagactgcttcattcatttcagtttccccagcacctggcttaactctcagacatgttagacggtttgtaagcaccggctctactgaactggcatcaaatcatgacctggttcagaagagacacgaggactggatctgttctaaacagattgtgcaaaggggaaagacacagactcagcatttccacagcttttaacatttcagcgagaggtgagaaagcatgtcaggaacacaggccccggccgatgaaagtgtctgatgctaacacatgaactgtcttctgctgggcacactaaggggccacaagcaagctacgccccagagccactccacattctctctgggtgcactggccctcggccacgcaaggccgcgccagcctccgaggtgagccagaaggacacacacctgtggactcgatgtccctgacttgggctcgatggccagccccagggtgactccgcccgccagcgctttcttcaggctctccttgacctccgtcagctccagctccaggctgacacgctccgcctccttctgccggcactcctcctccagctgcttcagcttctcctccaggatcgcctgcggcttcctgcctggaattcccagaaacgccgttactcccgcggcaggcacaggttctccaaacaacagagaaggcacctggtccccaagaagaacttccacaaaacgtctgaggtcgagctcccctgacttaggtcctcgttgtgaaacttaaattcagcagttctctaagggatcagagtccttctcctaccatttccctttgctgcagccgttgaggactcggaccaggaaagaggagatgctgattctgacgaaggccaggagctcctggctctgggcctcaatgttctcattttaaaacgtggaccctaaactccacagttcccaaagctgccaccttcttggagtgtgaaccctgtcctcccctaacgctccgccgatccttcagtcatcttatttgcgcccgaggcaatgaacagtagctcagcttgcatctctactggacatggcacacatttctttaaggcacattcacttattttatttgaggtttgctgcagtgacctaagatgcacccactgggcagatgagaacaccaatcccaagaggtgaacggacttgtgcccagggcctgggccggtggtggccggcaggcgaggttctctttttcaaagccaaaagcactcctggccctcctgcatcttcactatcctgcaagctgggaacacgggagaaatgctacttctgtctcattaaactccatgccccgtcccattctctggcacagcctcctcccgtagggtcagcctcagactgcaggccacatcctgggcctcctatagggtcagcccgacctgccctgccaacacctgccttccctcctctaaactccaaaagcatttcccttcatcagatcattgaggcacaaagtccagcaaggctggagctgctaaccacctgctgggtgtgcgtcagctcctccccgcgcggcgagccatgggaaggccacagcctcttctctggaccacccagggctctgaggcatctgaagcccccgtcccagcccaggccagtacaatctcaatctaaggagccagtcttccgtagtctaagcaccgggctggaagggaggccatgcgtaggtaagcggtgccaccccaggctcaggagctgagcgccagctcccgccagcaggaattgcacgcgcctggcccagggctgccactctggctgcaaactcagtttctgtgacttcagtccctctctggtgtctgtattccattagcctggcctcttccctgatgcatcccaagacagatgctgccttgctctcgcctgtcccttctcaacaaacgaggggctgcttctacccttgtctggacttctgaatattactgacccctgtgggctaccctctgtagagaaatccagctgatccctcctacccggtgaccagaatctactgcgtcctgcggatacaggggccatcctccagacaatctctgttgtcagcgccagaagccggaacaggtcccccagcacctcccctgcctcggtgagcagcgtgtgggtctggccctggcctctgcctgcacgccgcatgtttgaccacacaggcacctgcctcggggttaccagcaatgtttccaagccccaagaaacactgtgagataacccactcttactaaataaaatgacagccttggtgagcaataggtcctttgggcaaagcagaatgaaatctccagtctctaatacaaacatgcaccctgggcagtcacccacacccttcataccggcgttcacttcaatagccgctcgaaggtcttttctttccttgcggagctgggccagcctattccgcagggcctctttcctcttcagcagctcctcctctttggtctgtagccgcttggcatctgcttctacccggttcttgccatacttgtactgggcagcatcttgagaagaaaaaaaagcagcaattaaaaattaggtttactagcctgggaaatatgggacgatcccttctccacaaaaaatacaaaattagccaggcatggcggcacatgcctatagtcccagctactcaggaagctgaggtgggagaatcgcttgagcttgggagcttgaggctgcagtgagctgtgatcctgccactgtgctccagcctggatgacagtgagaccccgtgtcaaaaaaaaattaggtttattcaagcagataatggggtaactcaaaaagcctgttgaatcagccaactcagtaaacaaacacaaagcattattttgctaattcaacaagaaaaggacagggctggtatgaaccaagcagaaaagtgactagttcaaattctccaatattctttgaatcaaattcttaaaaacgaaaacagaatattaggaaattcctttaattcacttccctttgaggcacacggcttataattaatctgcaacaaggtggagaatgaacattctataatcggaaaagacaggagtaatatcaaaaataatgtctgaaatttgcttccttctctacgtcttcaaatccttccctaacaccgcagtatctgttccttatggccatgtcatctgactggctctgaattgctgctacacccccagcactgagattagcacccggcacggagtgtggcacaataaatgcttgtttagtgaataaatgaacaacggatacatgaagaggcaaccaggagcggtatctggagcctgactgtctaggaaggagtcccagcttacacttgtagctgcatgacctggaacagggcacgaatccctctgtgcctcagtttccctcatccgtgaaatggggatagtaagagcaggcaattcactgagtggttacgaggattaaatatttataaagcacttagaacaaacacaaatgggcaacacataaatgcttatttcataaaatgaataaatgaagaggaaactagctgtagggaaaatttacagacttggcaacttcacatcaccagtgaaaacagctttcaaaacctgaccccatgctctctcctattatgttggcttttcaataacagtaatttaggacaacacctctttgttaagacacatggaagagatgaaggttctaacaaaactcggatggaggatcaccgatttcaaagcttccgtggtctcccagtcgcttctaacaatcactcacgcctgaaggcaactcccaggccttcctgactgcacaccccaagtgtctgactccctcacaaggctagaaactacttcaggtagaagccacaggggtggcataatgattaagaataaaaacactggactcagagaggtggctagaaacccacactccaccctcccttgctccatgactctgcaagcaacctccggagaagctcagcttcaccctctctaaagcagaacgagaaggaatcctgtgtgtgtgtatgtgtgtgtgcgtgcgtgtgcatgcgtgttttaaattagaacgttatatctgaaaaaaatctaacaaaatgatacgacgcctgatgtagtggacattcactgacaattcttaccatatcagcgataagtgattcccagagccttgtccactcagggacagcagggagccatttctagcacctgtcctaaatgctggatttgccaattcttgcaacgtaagttatcatgatttcaatgaaatactgcatttatgaaggcataaaaagtgatcactccccagtcaattttcccctaatcaaaagaaccacatagaatgacagcaaaagcgtcggcagcctgaggagaggcgaagcattcgacaatctgaaacaaaaggatcgctgtttgcagctaaggttaacaacatatttggcaaacagggccaagtccaaactctactcgcttatttctaaactaagctgtttccccaatgaactcaatgcaatcacctataaatttccacatcttttggtccccatgtaataaatcccatctaatctataatgcaaccggctggattcaagcaaaaacacggaatgccattatttttctcttttgtcaccattagacgtcaccacagttaataaaaactccctacagaacatcccataaaataaaggaataaatcatctaggaaataaagtcagcacaggtactgacagagaaacaccatggcgattgagactccgtgggactccgattttgcttgtaacaaagctttccaggtgtgagctgctcctctcccccatctgcccctcctcaaagaaacaacactaaaagaggtgaaagtaaatacacctgatacattcaggaaataagatttgccagataaggtcaaaggaagttagtacattaaacaaatggtggtaggagggaggatttggcccaactggctccaacctatctggtcaacacgtatgttgggtagaacagaggtggagaaaagcctagatcagggatgtatacgcttccttggggcagacgcagcctggccctgcggagcgatttcaagcctcgttcacgaacatggccaaggacactgccagcctcttcattcccctgtgtggatgctccaactccaaaagtggaaccacagggcaaatgaatgtcggcacgtgtcggtatggcagcctcgctcttcgacagctggtgtgggggttaccacctggggctagctggcctcatcttcgttagcactgagactggtctaccagttgcacagattcagatttgaaaatctcaggtgcaaatcccaagtggcgatggcatgtaaccacatcaaactcaacatctgcacctaactcccaccttctttctctgggaaatcttcctggacatgcccagatggactcaggagcccatcacctgtaaatccccacactgcagccctgccacttgcttgtctgcatgtgtgggtccgctggaccactttggtgtatctttgagccccttgagtgaaaaaatgctgcctggctggctccctgattagacatccaacataatgaggactaacaccaatacaaacacttaagagatgacatatcgccctagctggatctactacagggaagggaagagggtgctgggtccaggcaggctgagtgtctcatgtcttaatgcttctctgcccaatctatttccggctggatgtggagtctgaaggcctggcacccactctggctctgtgatttaccagctgtgagccttgggggagctgcttactctcttggtgattcttttctcatttctatgatggggtagaggataatgcctatgcttacaaagtggctgtgggaagtaaaccggatgggataagaatggcttgctgtggaccacaggcaccgcaggataaccattcctcagaactcctcatactgctctagtgcttggaggtccgtgtattacctcagctattccaaccgcaccaaccacgggagccacgtgtctacgtctgacagataaagatgctgagtttagagtctgcaaggcttgacaaccacagatcagggacaggagctgaggtctcctgacctggagcccagggccacccggagctgcaagaaacctgcactcacaactgcctcctattttaaaatgctgagtcgatcccacaggtggcaaaccagttctgggcttcaatttacaagcagtcagaaaagctgggttgaaatcgccactgtccttctatgtggctgatgaggaaggatgacggtgcccaccgctccatctctccagctgaccccaagctggcactcacgggtgggcaggctcagacaggcccagctccaccaagtgcacttgaagccggaatgcaagacatccgatggtatacttactcgaacccgtccttttcacaacagccgcgggatccgctttctttggctgactgctcagagtcttcccttttcctgtgaccccattagacgccacggggggctttttacccttgagctgttgaaataaacatataagaacattaaaaataaacacaaagtcaaaaaaaaaaaaaaaaa

SEQ ID NO: 1884 - protein, 91 aa, Homo sapiens [sequence omitted]

SEQ ID NO: 1885 - protein, 56 aa, Homo sapiens
MTWFRRDTRTGSVLNRLCKGERHRLSISTAFNISARGEKACQEHRPRPMKVSDANT

SEQ ID NO: 1886 - protein, 56 aa, Homo sapiens
MLTHELSSAGHTKGPQASYAPEPLHILSGCTGPRPRKAAPASEVSQKDTHLWTRCP

SEQ ID NO: 1887 - protein, 100 aa, Homo sapiens
MASPRVTPPASAFFRLSLTSVSSSSRLTRSASFCRHSSSSCFSFSSRIACGFLPGIPRNAVTPAAGTGSPNNREGTWSPRRTSTKRLRSSSPDLGPRCET

SEQ ID NO: 1888 - protein, 195 aa, Homo sapiens [sequence omitted]

SEQ ID NO: 1889 - protein, 90 aa, Homo sapiens
MTALVSNRSFGQSRMKSPVSNTNMHPGQSPTPFIPAFTSIAARRSFLSLRSWASLFRRASFLFSSSSSLVCSRLASASTRFLPYLYWAAS

SEQ ID NO: 1890 - protein, 104 aa, Homo sapiens [sequence omitted]

SEQ ID NO: 1891 - DNA, 1450 bp, Homo sapiens
gttggtgctcagagtgtggtcaggcggctcggactgagcaggactttccttatcccagttgattgtgcagaatacactgcctgtcgcttgtcttctattcaccatggcttcttctgatatccaggtgaaagaactggagaagcgtgcctcaggccaggcttttgagctgattctcagccctcggtcaaaagaatctgttccagaattccccctttcccctccaaagaagaaggatctttccctggaggaaattcagaagaaattagaagctgcagaagaaagacgcaagtcccatgaagctgaggtcttgaagcagctggctgagaaacgagagcacgagaaagaagtgcttcagaaggcaatagaagagaacaacaacttcagtaaaatggcagaagagaaactgacccacaaaatggaagctaataaagagaaccgagaggcacaaatggctgccaaactggaacgtttgcgagagaaggataagcacattgaagaagtgcggaagaacaaagaatccaaagaccctgctgacgagactgaagctgactaatttgttctgagaactgactttctccccatccccttcctaaatatccaaagactgtactggccagtgtcattttattttttccctcctgacaaatattttagaagctaatgtaggactgtataggtagatccagatccagactgtaagatgttgttttaggggctaaaggggagaaactgaaagtgttttactctttttctaaagtgttggtctttctaatgtagctatttttcttgttgcatcttttctacttcagtacacttggtgtactgggttaatggctagtactgtattggctctgtgaaaacatatttgtgaaaagagtatgtagtggcttcttttgaactgttagatgctgaatatctgttcacttttcaatcccaattctgtcccaatcttaccagatgctactggacttgaatggttaataaaactgcacagtgctgttggtggcagtgacttcttttgagttaggttaataaatcaagccatagagcccctcctggttgatacttgttccagatggggcctttggggctggtagaaatacccaacgcacaaatgaccgcacgttctctgccccgtttcttgccccagtgtggtttgcattgtctccttccacaatgactgctttgtttggatgcctcagcccaggtcagctgttactttctttcagatgtttatttgcaaacaaccattttttgttctgtgtcccttttaaaaggcagattaaaagcacaagcgtgtttctagagaacagttgagagagaatctcaagattctacttggtggtttgcttgctctacgttacaggtggggcatgtcctcatccttcctgccataaaagctatgacacgagaatcagaatattaataaaactttatgtactgctgtagc

SEQ ID NO: 1892 - DNA, 599 bp, Homo sapiens
gggtcgaggtcgacgggtatcgataagttttttttttttttttttttaaaggagcaatgacatttcctagaagttactctaagaatttccctagagggtcgggtatcatctcagccagatctttctcatccttcaaggccctgtttggtacagcttgctaggaagctgttccagactgcagcagccctctctggggtctctctaccacttcccaggcactcagaacttgtgcctcagtagactgttttgtggcactgtcccattctctgattctccatgtgagctggttttatcccatccagcatggctgtgaaatcctaaaggttcaaaccccagccactcttcacctatatttcccccaaatggctagcacgggaaagggcccaaagtaggtgctcagtgctgatgagagagtagaatttaaataccccaggaagcattgtgagttactacggaggccatgaaatgctgccacctccccaagctgattaaagagtgatactaggaaaataggtagggaagggctaatcagaaatgcctctggttcagaagatgctgagttttaaagtccagagagccaaagaaaaaaaaaaaaaaaa

SEQ ID NO: 1893 - DNA, 8372 bp, Homo sapiens
  misc_feature (1)...(): n = A,T,C or G
aagcttggtgccatctattttggactatgccttgcatacagctttatgggaacatttgtcaggcaaaagtataataatggcaaactctacgccttttattttaaattagattggtgtgatttgatgctgacgggagtgagagtaatggccttatcctgctgcaggctgtgctgaggatggcctggtctgccaccctcctcgagtagcattttgcatgtgtaacagggtctcccctctggggcacaacaacaaagagaagttgctaaggacaagaagcaggtgcggaaatgcatctcccattggaacagccctgggcttactccaatggctgagagaggtgctatggccagtcctcccagagctctgcagctgcacttgggggtggacagtctcgtgcttgtcctgcgtgataacggccgtgaaagccagccaactgctgcccaaaatcacccagccgattgggggtttcccatcggcgcaccctgcccggagccaagaagacaggctggtgctgctgtatttgtatttatatccattgctgcgctctgcgttctcgtggcacgcctggacactcctccgcctccccctcctcttcctcctccagggccacctccccgccttccccacccccatctgcttctgtcaaatgagaaagtcaccgaggagaacccaaacactccagccgctgagagccccctttggcacttggcagcacgcggcggcgggctcctcggctcaacttcgaggagtctccgcgacgcaacttttggggacgctttgcatttaagagagaacgaccgaggaggaggagcgctctgcccggccgccgctacctgcggggagctcaccagcaaacgccactgcagacgaaggacccaaagaacgtaaagggcaaactgccgccgcggggagggggcaccgccgagaagttagagtgtcccagagacaacctgctcgagcgctcggccggagacactaaggcggcccggggcgcggcgtggccctggctggtcccccagccccctcctccggggcgggagcgacgccggggcgcgacgagccccggccggccgagcgggtctccgcgggcagccaacattgatttcctccgggccgagggcgagggcccgggcggcggcgggctgcagccgcggcagggcgagagcatgtccaagccggtggaccacgtcaagcggcccatgaacgccttcatggtgtggtcgcgggctcagcggcgcaagatggcccaggagaaccccaagatgcacaactcggagatcagcaagcgcttgggcgccgagtggaaactgctcacagagtcggagaagcggccgttcatcgacgaggccaagcgtctacgcgccatgcacatgaaggagcaccccgactacaagtaccggccgcggcgcaagcccaagacgctcctcaagaaggacaagttcgccttcccggtgccctacggcctgggcggcgtggcggacgccgagcaccctgcgctcaaggcgggcgccgggctgcacgcgggggcgggcggcggcctggtgcctgagtcgctgctcgccaatcccgagaaggcggccgcggccgccgccgctgccgccgcacgcgtcttcttcccgcagtcggccgctgccgccgccgctgccgccgccgccgccgccgcgggcagcccctactcgctgctcgacctgggctccaaaatggcagagatctcgtcgtcctcgtccggcctcccgtacgcgtcgtcgctgggctacccgaccgcgggcgcgggcgccttccacggcgcggcggcggcggctgcagcggcggccgccgccgccggggggcacacgcactcgcaccccagcccgggcaacccgggctacatgatcccgtgcaactgcagcgcgtggcccagccccgggctgcagccgccgctcgcctacatcctgctgccgggcatgggcaagccccagctggacccctaccccgcggcctacgctgccgcgctatgaccccgcggggccgcctcgcgaggaccggtgtgcacacgtgtacatatgtataggtacgagcgctgcggcctccccgtgcgccctcccgcgaccgggggcccggtttgtatgtacatagaatgtataggtgccaggtagaggcagagaggccaggcggggcaggagtggccaagcgcgcaagggcgcgggcgagcaggcctgtgaattcgcaggatcatttcagacccgcacttcggcagccaactcgaaagcaggcggttgtgtgcggcagcagttggcgtttgctttgcacttcggaacctgttgcgttttgacccacggaggtggaggagtaactttttgacatgttggcctttccagttttgttggaagtttcatggtcggttttgtttttgtttctcattcttcttcctcgcccctcagccccccaacccccaaccccctcccggtccgtgttgcatgcacgctgttcaaatgtgaggtctgaaatggctggcacacgggaaaagctgcttgtgtcattcgtttctgggagtgggatggctctgagcagcctcgcctccctgtttgtactatttgaactttgcagatctctgttctctcaagcagaactcccaaccagatccattcttgaccagtgaccggctcgaatctggccttttgtgtgagatgatcacggnttcttttgtttatcacgccatttgcaaatcagagcaagagctctttctcaagggcaagaaacgcaaacaagaaatatttgtgagatgaaagttgtcaattggattttcttcctaaacaaacaacaacaacaaactactagaagtctccctgagtccactcgcttggatttctgacacagtttacaaaaaaggaaaaaggcactgctcctattttcccttatggctgagttcaccttaagattgtaaatgtgtatatgtcagtgaaaacattgaggcttggaaaatgtgttattttcgttgccctaagtttgagtcgactttagactcaaaaacattttgagcgaatatcaaagttaacttttaaaaattgcgaaactatttcagaatcgcaattttatcgaagattaaatcagacttttttgtctggtaattatatatttattatttagcaaaactgaagaaaaaaagcacagaattgtttcaacagatgtctctcattttcagctagcatttctctcccaagttgagctggtttaatgtgttttggatttccctcctcaattggcttattttttagatcacctgcaattcatttgcaaattgcaataaaacacattttagaaaaaaggaaccttcaattattagctttgtttctttttaaatgtatatattttgactaatgtttgtgaatgaagttggctaacatgtatttagtttcattttggctttatgtaatataaagtttttaaaattttaaatatggttttaacctttatgtgtaaatgattttctagtgtgaccttctaatttaatattagacgtctaaggtatatctgtaaattagaatccgactatcactctgttcattttttttgaacaaagagtttaaataaagcctgaaccagggaaaagaaaaatcttctatttcttgttgagttcctaacaagatttttatctgaattgcccttacgtgcctggtccaggtgaagtgtaaggtatcctccaaaggcaccctttgtttcacttttgaatagatttactaggaaatctaaatcaagccattgttattcagagccaaaaacctgatttatcacatttttaatcgtgaataggaaagaagatttttaaaaagcccaagtcgttgtattagctttaacaacaacaaaaaaaaggcattcatgaaccagtagaacagagcccattgaaaacatccagacctttcaaagcatttcaccagtttctagtaacattttaagaggggaaagttgcttgaccactttatcttgttagttgaagagccccaccacttaaatcagtgtaatttgttctcctatctttggggtattccttgttgacaccttaaggttttatttggaaggataatcactactaacgacaaagtacaaattttggcctctttaggacttaattttgttatgctaatcgcattaaagtagaagtataacattcaaatggagagggttggatttctagggctagacaaattgctactaaagtttgaaaaatcataaaggattttaattttagacaagaaatagaagactgtcagaaaaaaaaaaataggaagatctcgcccccccgcaaccaaaatggaaattctcaagatactatatacaagtcttaaaccagtttccccattgagaccatctctggagctgcacgtctttataaacgacccaagtctttaaagtcattgttttcccccaacggaataatattttaaaaaccatgaaaagttttggaaatgtgagaaataggctctgctggtttgaccctgattcactaattaaaatgatccctctcctgttattccctgagctctttgcaatattataagttaattcatatggttctgagcgattatgcaaaactaatttggactgtccaggggtaattatccctgacacggttaattaaatcctttcaaggcttcgtctttcccttttgtagcagcccatcccttctcaacacggaacttctgcggctcgctggaaatcaccccagccctaaatcttagttaccaccctgagccttccagctcggccgcctcctcggcctgaagactccccgcctcctcccgccccctccccttttcccaaagatcagcgttttctgggagaaacgctccggagttgttgatgaatgagaagaggactggaaagatgggtaagaggaggggtgaggatgccgagggggagcaccgaggtcatatcgccaacagattgtgcggctgtttgaggacctccacaggccccacagactcgtttatcacccattctgactccaatggtcttgctaacaagttggcgggttttgcgcctgcagagagcctcctgccaagttagactgtgcagaagtaaggggttggagcggggggagcggctccggggcaagagggcgtagagaaaggcccggggnngggnggtgtaagcgtctgaaagtggcccacaaatgcagcgctgtgattgggcagagagctgctgctggctcgcgatctctatctccatctctttatctatctccgtctctctccctgtttctccatttttctttctttccttctctctccttccttccttccatctttcttctttcccttccttttattcttctattttcgtttcttttcaaggttttttttaaagccatgatgcaatttctttggtattcaccgttgtcccaaaacttgaagcaagcctcgtatccaaggggccaggcatgttgcttcgggctttgtgcaaacaggtggaattgcgctgtgtaagcagtaagaactggtgctggggagctgtcgcgcgagggggtggctttgggagagcagggttgctggccgcgattgttacttcccttgacaatttcctcctccccctcccccaagaagataggagaaagcaccgcggatctccctctcaccccaggctcggggcgcagaagatggagagaagattccactctccccggagcagatagggacggtcgcgccagccaatcagagcgcggctcggcgccggcgctcccggccgcctgggccgccgtgtcctccaggcaagcgaagttcccgcaactcgtccgcctcgagggtccgcgtctttcttgcgcccgcggcccagcggaggccgagggagccgtccaaactttattaatctctcctcctttctttctccctcagcccagtgcatctcaaaggtcagccctcttcttttaaaagactgatattattaatgcactgacaattcctcccccccttttcttttttctctcttgcaggggggaaaaaaagggaaatggtgaaaagagctttttttatcctttttttttttttgtccttcagtgggagcgtttagacagtcgaggaggttttgtccgagaacaaaacgcagggttgggaggttttgtgagagtgttgtttgttgaagtggagctaagaaaaagcggcggctttctcctcattgtgaagaaaccaatcagtggtatttggaaaactgttagcattgtgcacttcttctgtgtccattgtgaggcgtttcttttcacaaggtttttttttcagccgatccagctggccggaatgaatagcggtgcaatgtgtacacgctttgtccctccggccttcaagtagcccccattgaatagactaagttgacctgcgtgacagtgaaacaacataataaaaaatacatgagcccctgaataggagcaggcgcataaataaataaaatgggtgaccaaaactggataaactgaatgacaaaacggtgaaaggggaacaaaaagatatttaacacgctagattagcattagaatgcgatctacaaggcagaacaattgatgaataggtttaccggccaagaaagaaatggactaaatgccctttgaatagatatgctttttgcaagggctttgaatagatatgcttttgcaagggctgaatgggaaaaggtaaagatgaagctatgcaaatgagccggggaactttttatatatattctttaaacacacacacacactgcggggggaagagtgctgcctcgggatgtttatagaagcaataattgccattattagcattgtctgcggcagatagaaattgaacaggttgggataatatagggtagcagtaattattcttctaattaatggtcctttgctacttgaaaaaagaaaaaaggaaagaagtagtaaaagttatgcagaagttatgtttccttgtgtccatttgcccagcgctggaatctgtggagcaggaagcctggcaattccaagatacgcgatgatcytcaaacattcccgggagccagtcctgaggctctggcttcagggcctagtttccatttatgccgcgtttttgagagtctaatactgtgtctggcacatggtaggtgctcactgaatagtcgtggtatgaatgaatgaacgaatgaatgaatgaatgaatgaatataagtttaatgggggaaacccgggcctcctaataaaggtaggggctgggggatacctaggggcttccccaggaggatttcttttttcatcatcccacccctgggagaaaggtccacgcaggatggtcgcttcccccttgctgagagttttgccttcagcctatctgggccgctggaaaagaggagaagaataaacaagagacaagcaactactcccctaccggcgttccgtccttgtcctcactgccaaatccactccaaagccgaggatggtgagactgtgaagttgcaaagaaacacagagcccacccccttaaagaattacgatatatttaaagtttgcctctttcaggtttctctccttggctcctgcccctttcccctcccggctccttgtccttgactgaacctcatgggacagagaacctcctgtcccccacgaggcaaggcgcgaacccgcagagatctggggtgccctttggttccctgcgctgccctggaggcgtccatagaggcctttgccgccaaggacagcaattgttttattttcgatggttgctcgccaggctgcgggtcgcgggcccacccagccgtcgaactttccagtcgttatcagcgctgctcctaacttaatggaataatgcaaattatagcctgcccagctgacacgtccctgcgaatgcgccggggctgagctctggccagccgctctctcgacgtcctggacggccggagggaatgaagctctgaattgtgacaaaagtggggggggcaccccaaattctcaaagcaatgttcttttttttttcttttttcttaagcaattgagccttaccaaatgtcggggccggccgcacggaagccttgcatattttaaagtgtaacctgagccttcgcggtttcagcttcacttaaaacatgcaaattcttgaaattgaaaaatctgaaaaacttccgaagagttctatctgaataaatccaaatccattgggagtcgctttgaggagacaaaacgcacagcgatttggggtgagggatatttgtggggaggcaggacgtgctggattgggtttccagggtcaaggtgtctctgggccttcgacgatagccttagcgcagagcagggaagtggcaccgctaggcagcaagctcagttgctctacttttgtgacccatccccccaccccccccaccgccacccttgcctccgggccactgcccctctctgcaagctt

SEQ ID NO: 1894 - DNA, 6942 bp, Homo sapiens
ggcatggaacctaaagactagaggcggttgtgtgagtcaggaagaggggccagatatctgagtgttcctctttagtttcttcaattgcagataatatggtgtctaattttatgttgttcaggaaagacagtggttcctgactcaggaagacagtctcagaaacatgtggaatgatattgagctgctaacaaatgatgataccggaagtgggtacctgagtgtcggttcaagaaaagaacatggaactgctttatatcaagtagatttgctagtgaagatctcttctgaaaaggcctcattaaatccaaagatacaggcatgcagcttaagtgatgggtttattattgtagccgaccaatcagtgatattgcttgacagtatttgtagatcacttcaattgcatcttgtctttgatactgaagtggatgtagttggcctttgtcaagaaggaaagtttcttttggttggcgagagaagtggcaacctacatcttattcatgtaacatcaaaacaaacactactcactaatgcatttgttcagaaagctaacgatgaaaatcggcggacttaccagaatcttgtcattgagaaggatggttcaaatgaaggtacctattatatgctacttcttacatacagtggatttttttgtattacaaaccttcagcttttaaaaattcaacaagcaattgagaatgtagacttcagtacagcaaaaaagttacaaggacaaatcaagtccagttttatttctactgaaaattatcatactcttggttgtctcagtcttgtggctggagatttagcaagtgaagttcctgtgataattgggggaaccggtaattgtgcattctcaaaatgggaaccagattcttccaagaaaggaatgacagttaagaaccttattgatgcagagattattaaaggtgcaaagaagttccagctgatagacaatctactttttgttcttgatactgataacgtgctgagtttatgggatatttacactctaactcctgtatggaactggccctctcttcacgtagaagagtttcttcttactacagaagcagactctccttcatcagtcacgtggcaaggaattacaaatctcaaattaatagctctgacagcttcagctaataagaagatgaaaaacctcatggtttattcattacctacaatggaaatactatattctttggaagtatctagtgtttcttctctggtccaaacaggaattagcacagataccatataccttttagaaggagtttgcaaaaatgatccaaaattgtctgaagactcagtctctgtgttagtactcagatgtcttacggaagctttaccagaaaacagattgagtcggttacttcacaaacacagatttgctgaagctgagagttttgccattcagtttggactagatgttgagcttgtttacaaggtcaagtcaaatcatatattggagaaactggcattgagttctgtggatgccagtgaacagaccgaatggcaacaacttgtagacgacgctaaggaaaatctacataagatccaggatgatgaatttgtggtgaattactgcctgaaagctcagtggataacctatgaaaccactcaagagatgctgaattatgccaaaaccaggcttttgaagaaagaagataaaactgctctcatttattctgatggcttgaaagaggtgctaagagctcatgcaaaattgactactttttatggagcatttggaccagaaaaattcagtggcagttcttggattgaatttctaaataatgaagatgatcttaaagatatttttttacagctaaaagaaggaaaccttgtttgtgcacagtatctttggcttcgacatcgggcaaactttgaaagcagatttgatgtgaaaatgctggagagcttgctcaactcaatgtctgcatcagtctctttgcaaaagctgtgtccatggtttaaaaatgatgtgattccatttgtaagaaggactgtgcctgaaggacagataattcttgcaaaatggttggaacaagcagccaggaaccttgaattaactgataaggcaaattggccagaaaatggacttcaattggcagagatattttttacagcagaaaaaacagacgagttgggattggcatcttcctggcattggatttccttgaaagattatcagaacacagaggaagtatgtcagctaaggactttggtaaataacttgcgagagttgatcacgttgcataggaagtacaactgcaaattagccctctctgattttgagaaggaaaatacaaccaccatagtgttccgaatgtttgataaagtgctggccccagagcttattccctccatcttagagaagtttataagagtttacatgagagaacatgacttgcaagaggaggaacttctcttgctgtacatagaggatttactgaatagatgcagctcaaagtccacatcactctttgaaacagcatgggaagcaaaggccatggcagtaatagcgtgtttatctgacacggacctcatatttgatgccgtgctcaagatcatgtatgcggcagtggttccttggagtgcagctgtggagcaactggtgaaacagcacctggaaatggaccatcccaaagtcaagttattacaggaaagttacaaactaatggagatgaaaaaacttttacgaggctatggaataagagaggtaaatctcttaaacaaggaaataatgagagtggttagatacattctcaaacaagatgtcccatcttctttagaagatgctttaaaggtagcccaagcgtttatgttatctgatgatgagatctacagtctaagaattattgacctgattgatagagaacagggtgaagactgtctccttctgttgaagtctttgcctcctgctgaagctgagaaaactgcagaaagagtcatcatatgggcacgactggcattacaagaagagccagatcattctaaagagggcaaggcctggagaatgtctgtagcgaagacatccgtggacattcttaagatactatgtgacattcagaaagacaatctgcagaagaaggacgaatgtgaagaaatgttgaaactatttaaagaggttgctagcttacaggagaactttgaggtctttctttcatttgaagattatagcaatagttccctggtagcagatctccgtgagcagcacattaaagctcacgaagttgcacaggcgaaacacaaacctgggagcaccccagagcccatagctgctgaggtgaggagcccaagcatggaatcaaagctgcacagacaggcactggccctgcagatgtccaaacaagagctggaggcagagctgaccttgagagccttaaaagatgggaacatcaaaacagcactgaaaaaatgcagcgacttgtttaagtatcactgcaatgctgacactgggaaattgctatttctgacatgtcagaagctttgtcagatgttggctgataatgtcccagtgacagtgcctgtgggactgaatcttccttccatgatacatgatctagcaagccaagctgccaccatttgcagtccagattttttactagatgctttagaactatgtaaacatactttaatggctgtagagctttccagacaatgccaaatggatgactgtggaatcctcatgaaagcttcttttgggacacataaagatccatatgaagagtggtcttacagtgacttcttcagtgaagatggaattgttcttgagtcacagatggtgcttccagtgatttatgaactgatttcatctcttgtgcctctagctgaaagcaagagatatcccttggagtctaccagtttgccatactgctcccttaatgaaggagatggccttgttttacctgttataaattccatctctgccctgcttcagaatcttcaggaatctagccagtgggagctagccctaagatttgtggttggttcatttggtacctgtcttcagcactctgtgtcaaacttcatgaatgccactttgagtgaaaagttatttggagagactacattagttaaatcaaggcatgttgttatggaattgaaagaaaaagctgttatatttatcagggaaaatgctacaacactactgcacaaagtatttaattgtcgcttggtagatcttgacctggcgttgggttactgcactctcttacctcaaaaagatgtgtttgaaaatctctggaagctcatagataaagcatggcagaattacgacaaaatcttggcaatatctctggtgggctctgagctggcaagtctctatcaggaaatagaaatggggcttaagttccgtgaactcagtactgatgcccagtggggcattcgtcttggtaaacttggtatttcttttcaaccagttttcaggcaacattttctcaccaagaaagacctcattaaagctcttgtggagaatatagatatggacacaagcctcattttggaatattgcagcacatttcagttggactgcgatgcagttcttcagctcttcattgaaacgctgctccacaacacaaatgccggccaaggccagggagatgcaagcatggactctgcaaagcggcggcatcccaaactcctggccaaagcccttgagatggttcctttactgacgagcacaaaagatttggtcatcagtcttagtggaatactacataagctggatccttatgactatgaaatgattgaagttgtcttgaaagttatagaacgagctgatgaaaagataaccaatattaatattaatcaggcattgagtattctgaaacatttgaagtcatacagaagaatttctcctcccgtggatctagaatatcagtatatgttggaacatgtcataactttgccatcagctgcccaaactagactgccttttcacctgatattctttggcacagcacagaacttctggaaaattctctctacagaactcagtgaagaatctttcccaacattgctcttaatttcgaaattaatgaagttctctctggacactctgtacgtgtctacagcaaaacacgttttcgaaaaaaaactgaagccaaagctcctgaagttaacacaagctaaatcctcaacactgattaacaaggaaataactaagatcacgcagaccatcgaatcctgcttactctctatagtcaacccagagtgggctgtagctattgccatcagccttgcccaggatatccctgaaggttccttcaagatatctgctttgaaattctgcctttatttagctgagagatggctacagaatatcccatcgcaggacgaaaaacgtgaaaaagccgaggctttgttgaagaagcttcatatccagtaccggcgatcgggcacagaagctgtgctcatagcccacaagctgaacactgaggaatatttaagagtgatcggaaagccagcacatcttattgtcagtctctacgaacatcctagcatcaatcaaagaattcagaattcatctggcacagattatcctgatattcatgcagcagctaaagaaatagccgaagtcaatgaaattaatttggaaaaagtctgggacatgttgttggaaaaatggctatgcccttcaacaaaacctggtgaaaaaccatcagaattatttgaacttcaagaagatgaagccctacgaagagtgcagtatctcctcctgtctcgtccaattgattatagttcaagaatgctgtttgtatttgcaacatcaactacaaccacattaggtatgcatcagttaacttttgcccatagaactcgagctcttcagtgtctcttctatttggctgacaaggaaactatagaatctctctttaaaaaacccattgaagaagtgaaatcttatttgagatgtataacttttctggcatcatttgagactttgaatatccccatcacatatgaattattttgcagcagtcctaaagaaggaatgattaagggtctgtggaaaaaccacagccacgagtccatggcagtaagattggtgactgagctgtgtttagaatacaaaatctatgacctgcagctttggaatggactcttgcaaaagcttctgggcttcaatatgattccttatctaaggaaagttttaaaagccatctccagtatccattctttatggcaggttccctacttcagcaaagcgtggcagcgtgtgatacagataccactgctttcagcctcttgtcctttaagtcctgatcagctgtcagattgttctgagagtctcatcgctgtcctcgaatgtccagtctcaggtgatcttgacctgatcggagtcgccaggcagtatatccagttagaacttccggcttttgcattagcttgtctgatgctcatgccccactcagagaaaagacaccagcaaattaagaattttctgggttcctgtgaccctcaggttattttaaagcaattggaagagcatatgaacacgggccagctagcaggattttcacatcaaattagaagtctgattttgaataatatcatcaataagaaggagtttgggattttggcaaagaccaaatactttcaaatgttgaagatgcatgcgatgaataccaacaatatcactgagctagtgaactatttggcaaatgacttaagtttagatgaagcttcagtcttgataactgaatattcaaagcactgcgggaaacctgtgcctccagacactgctccctgtgaaattctgaagatgtttcttagtggattatcgtaaatcactgaacctttttttcaagaaggacaagaattttggagtctgctattaatggaccatatttattacagtttttaaattgtacaatctctgtattatagctatttgtctaacattaccccacatgtaataaataaaacaatatgagc

SEQ ID NO: 1895 - DNA, 884 bp, Homo sapiens
ttgctgcgttgtgaggggtgtcagctcagtgcatcccaggcagctcttagtgtggagcagtgaactgtgtgtggttccttctacttggggatcatgcagagagcttcacgtctgaagagagagctgcacatgttagccacagagccacccccaggcatcacatgttggcaagataaagaccaaatggatgacctgcgagctcaaatattaggtggagccaacacaccttatgagaaaggtgtttttaagctagaagttatcattcctgagaggtacccatttgaacctcctcagatccgatttctcactccaatttatcatccaaacattgattctgctggaaggatttgtctggatgttctcaaattgccaccaaaaggtgcttggagaccatccctcaacatcgcaactgtgttgacctctattcagctgctcatgtcagaacccaaccctgatgacccgctcatggctgacatatcctcagaatttaaatataataagccagccttcctcaagaatgccagacagtggacagagaagcatgcaagacagaaacaaaaggctgatgaggaagagatgcttgataatctaccagaggctggtgactccagagtacacaactcaacacagaaaaggaaggccagtcagctagtaggcatagaaaagaaatttcatcctgatgtttaggggacttgtcctggttcatcttagttaatgtgttctttgccaaggtgatctaagttgcctaccttgaatttttttttaaatatatttgatgacataatttttgtgtagtttatttatcttgtacatatgtattttgaaatcttttaaacctgaaaaataaatagtcatttaatgttgaaaaaaaaaaaaaaaaaaaa

SEQ ID NO: 1896 - DNA, 787 bp, Homo sapiens
gtgtggacactcctaggatagaaagtttggtatgttgctatacctttgcttctcccaccttccccaatatctaatatgtatttctcattcttagaataatccagaatggctactctgatctatgttgataaggaaaatggagaaccaggcacccgtgtggttgctaaggatgggctgaagctggggtctggaccttcaatcaaagccttagatgggagatctcaagtttcaacaccacgttttggcaaaacgttcgatgccccaccagccttacctaaagctactagaaaggctttgggaactgtcaacagagctacagaaaagtctgtaaagaccaagggacccctcaaacaaaaacagccaagcttttctgccaaaaagatgactgagaagactgttaaagcaaaaagctctgttcctgcctcagatgatgcctatccagaaatagaaaaattctttcccttcaatcctctagactttgagagttttgacctgcctgaagagcaccagattgcgcacctccccttgagtggagtgcctctcatgatccttgacgaggagagagagcttgaaaagctgtttcagctgggccccccttcacctgtgaagatgccctctccaccatgggaatccaatctgttgcagtctccttcaagcattctgtcgaccctggatgttgaattgccacctgtttgctgtgacatagatatttaaatttcttagtgcttcagagtttgtgtgtatttgtattaataaagcattctttaacagaaaaaaaaaaaaaaaa

SEQ ID NO: 1897 - DNA, 1838 bp, Homo sapiens
gtcgacggctggtttgaaaagtgacaacggccggtggattttaggagtttgctcggtttgtaactgctctttggtgagctactgggactgcagactaggaggagactcccaaaatggaaactctgtccttccccagatacaacatagctgagattgtagttcatattcgcaataaactgttaactggagcggatggcaaaaacctctccaagagcgattttcttccaaacccgaagcctgaagtcctgtacatgatttacatgagagccttacagttagtgtatggggtccggctggagcatttctacatgatgccggtgaacatagaagtcatgtatccacatataatggagggcttcttaccggtcagcaatttgttcttccacctggactcgtttatgcccatttgccgggtgaatgactttgagatcgccgatattctttatccaaaagcaaaccggacaagtcgttttttaagtggcattatcaactttattcacttcagagaaacatgcctggagaagtatgaagaatttcttttgcaaaataaatcctctgtggacaaaatacagcagttaagcaatgcacaccaggaagcattgatgaaactggaaaaactcaattcggttcccgtggaggagcaggaagagttcaaacagctgaaggatgacatccaggagctgcagcacttgctgaatcaagacttcagacagaaaacgacactgctgcaggagagatataccaaaatgaaatcagatttttcagagaaaaccaagcatgttaatgagctaaagttgtcagtagtttctttgaaagaagttcaagacagtttgaaaagcaaaattgtggattctccagagaagctgaagaactataaagagaagatgaaggacaccgtccagaagctccgcagtgccagggaagaagtgatggagaagtatgatatctatagagattctgtggattgcttgccttcctgtcagctggaggtgcagttatatcaaaagaaatcacaggaccttgcagataatagggagaaactaagcagtatcttaaaggagagcctgaacctggagggccagattgatagtgattcatcagaactaaagaaactgaagactgaagagaactccctcataagactgatgactctaaagaaggagagacttgctaccatgcagttcaaaataaacaagaagcaggaggatgtgaaacagtacaagcggaccatgattgaagattgcaataaagttcaagaaaaaagagatgctgtctgcgagcaagtaaccgccattaatcaagacatccacaagattaaatctgggattcagcagctaagagacgccgaaaaacgggagaaactgaagtctcaggaaatcttggtagacttgaaaagtgctttggagaagtaccatgagggcatcgagaagacgacggaggagtgctgcactagaataggagggaagactgccgagctgaagaggaggatgttcaaaatgccgccctgatcaacagccacccgaaaatggcctttcgctttctgtttggagtagttatattgaagctaatagaaggaccgcagtctcagctaactagcgtgggtaccattggttctctgtccttttatgaccatgtgctccctgtgtttttttcttggtgatggggatacaactcagggccttgcaggctacactgacttgcctccctaggctctaatgtaccatgtactatgtaggcttttgctacaattaaagtaacgtgtacagcttttatgtccctactctgtctccttttgtatgtgctggttggaataaacaaatagttactgacgtcaaaaa

SEQ ID NO: 1898 - DNA, 2103 bp, Homo sapiens
ctctgccgagcctccttaaaactctgccgttaaaatgggggcgggtttttcaactcaaaaagcgctcaatttttttcttttcaaaaaaagctgatgaggtcggaaaaaagggagaagaaaccggcaccctctctgagaggcaacagaagcagcaattgtttcagcgaaaaaagcagcaagggagggagtgaaggaaaaaagcaaaaaagggggcgacacgcaagtgcctgtaggggtgaaaggagcagggaccggcgatctagggggggatcagctacaaaagaaactgtcactgggagcggtgcggccaaggaggaagcagtgctgccaggctctgctccagggcacagctggctggcggctgccctgtccgcagcaaaggggcacaggccggggaccgcgagaggtggcaaagtggcaccgggcgccgaggctgctgagcgctcgccgagacgcggaccggactggctgccccggaactgcggcgactctccctactcagaacttggcctacgtttcccaggactctccccatctccagaggcccccacaaaaccgggaaaggaaggaaaggacagcggcggcagcagctcaatgagtgcctacagcagaaagcctgaacgagctcggtcgtaggcgggaagttcccgggggctgcccagtgcagccgcaatgctgccgcgagctgccccagcagtccgggctccgtagacgctttccgcatcactctccttcctcgggctgccgggagtcccgggacctggcggggccggcatgacgggcttctcgggggcccgccgcacgcccggcagcctccggagacgcgcgccgagcccggctcccacggcctctgaggctcggcggggctgcggctgcctggcgggcgggctccggagctttcctgagccggcattagcccacggcttggcccggacgcgaccaaaggctcttctggagaagcccagagcactgggcaatcgttacgacctgtaacttgagggccaccgaactgctactcccgttcgcctttggcgatcatcttttaaccctccggagcacgtcagcatccagccaccgcggcgctctcccagcagcggaggacccaggactatcccttcggcgagacggatggaaaccgagccccctggaggacctgcccctgcagttctgcctcacacggctcaagtcaccaccgtgaacaagggaccctaaagaatggccgagccttgggggaacgagttggcgtccgcagctgccaggggggacctagagcaacttactagtttgttgcaaaataatgtaaacgtcaatgcacaaaatggatttggaaggactgcgctgcaggttatgaaacttggaaatcccgagattgccaggagactgctacttagaggtgctaatcccgatttgaaagaccgaactggtttcgctgtcattcatgatgcggccagagcaggtttcctggacactttacagactttgctggagtttcaagctgatgttaacatcgaggataatgaagggaacctgcccttgcacttggctgccaaagaaggtcacctccgggtggtggagttcctggtgaagcacacggccagcaatgtggggcatcggaaccataagggggacaccgcctgtgatttggccaggctctatgggaggaatgaggttgttagcctgatgcaggcaaacggggctgggggagccacaaatcttcaataaacgtggggagggctcccccacgttgcctctactttatcaattaactgagtagctctcctgacttttaatgtcatttgttaaaatacagttctgtcatatgttaagcagctaaattttctgaaactgcataagtgaaaatcttacaacaggtttatgaatatatttaagcaacatctttttaacctgcaaaatctgttctaacatgtaattgcagataactttgactttcttctgaatattttatctttccttggcttttcccttgcttccccttttgccaatctcaacacccaagttgaagactttgtttttaaaatggtttgtcctgatgcttttgtctaattaaaacactttcaaaacaggaaaaaaaaaaaaaaaaaa

SEQ ID NO: 1899 - DNA, 987 bp, Homo sapiens
cggagagggggagaacagacaacgggcggcggggagcagcatggagccggcggcggggagcagcatggagccttcggctgactggctggccacggccgcggcccggggtcgggtagaggaggtgcgggcgctgctggaggcgggggcgctgcccaacgcaccgaatagttacggtcggaggccgatccaggtcatgatgatgggcagcgcccgagtggcggagctgctgctgctccacggcgcggagcccaactgcgccgaccccgccactctcacccgacccgtgcacgacgctgcccgggagggcttcctggacacgctggtggtgctgcaccgggccggggcgcggctggacgtgcgcgatgcctggggccgtctgcccgtggacctggctgaggagctgggccatcgcgatgtcgcacggtacctgcgcgcggctgcggggggcaccagaggcagtaaccatgcccgcatagatgccgcggaaggtccctcagacatccccgattgaaagaaccagagaggctctgagaaacctcgggaaacttagatcatcagtcaccgaaggtcctacagggccacaactgcccccgccacaacccaccccgctttcgtagttttcatttagaaaatagagcttttaaaaatgtcctgccttttaacgtagatataagccttcccccactaccgtaaatgtccatttatatcattttttatatattcttataaaaatgtaaaaaagaaaaacaccgcttctgccttttcactgtgttggagttttctggagtgagcactcacgccctaagcgcacattcatgtgggcatttcttgcgagcctcgcagcctccggaagctgtcgacttcatgacaagcattttgtgaactagggaagctcaggggggttactggcttctcttgagtcacactgctagcaaatggcagaaccaaagctcaaataaaaataaaataattttcattcattcactc

SEQ ID NO: 1900 - DNA, 2545 bp, Homo sapiens
atccaatacaggagtgacttggaactccattctatcactatgaagaaaagtggtgttcttttcctcttgggcatcatcttgctggttctgattggagtgcaaggaaccccagtagtgagaaagggtcgctgttcctgcatcagcaccaaccaagggactatccacctacaatccttgaaagaccttaaacaatttgccccaagcccttcctgcgagaaaattgaaatcattgctacactgaagaatggagttcaaacatgtctaaacccagattcagcagatgtgaaggaactgattaaaaagtgggagaaacaggtcagccaaaagaaaaagcaaaagaatgggaaaaaacatcaaaaaaagaaagttctgaaagttcgaaaatctcaacgttctcgtcaaaagaagactacataagagaccacttcaccaataagtattctgtgttaaaaatgttctattttaattataccgctatcattccaaaggaggatggcatataatacaaaggcttattaatttgactagaaaatttaaaacattactctgaaattgtaactaaagttagaaagttgattttaagaatccaaacgttaagaattgttaaaggctatgattgtctttgttcttctaccacccaccagttgaatttcatcatgcttaaggccatgattttagcaatacccatgtctacacagatgttcacccaaccacatcccactcacaacagctgcctggaagagcagccctaggcttccacgtactgcagcctccagagagtatctgaggcacatgtcagcaagtcctaagcctgttagcatgctggtgagccaagcagtttgaaattgagctggacctcaccaagctgctgtggccatcaacctctgtatttgaatcagcctacaggcctcacacacaatgtgtctgagagattcatgctgattgttattgggtatcaccactggagatcaccagtgtgtggctttcagagcctcctttctggctttggaagccatgtgattccatcttgcccgctcaggctgaccactttatttctttttgttcccctttgcttcattcaagtcagctcttctccatcctaccacaatgcagtgcctttcttctctccagtgcacctgtcatatgctctgatttatctgagtcaactcctttctcatcttgtccccaacaccccacagaagtgctttcttctcccaattcatcctcactcagtccagcttagttcaagtcctgcctcttaaataaacctttttggacacacaaattatcttaaaactcctgtttcacttggttcagtaccacatgggtgaacactcaatggttaactaattcttgggtgtttatcctatctctccaaccagattgtcagctccttgagggcaagagccacagtatatttccctgtttcttccacagtgcctaataatactgtggaactaggttttaataattttttaattgatgttgttatgggcaggatggcaaccagaccattgtctcagagcaggtgctggctctttcctggctactccatgttggctagcctctggtaacctcttacttattatcttcaggacactcactacagggaccagggatgatgcaacatccttgtctttttatgacaggatgtttgctcagcttctccaacaataagaagcacgtggtaaaacacttgcggatattctggactgtttttaaaaaatatacagtttaccgaaaatcatataatcttacaatgaaaaggactttatagatcagccagtgaccaaccttttcccaaccatacaaaaattccttttcccgaaggaaaagggctttctcaataagcctcagctttctaagatctaacaagatagccaccgagatccttatcgaaactcattttaggcaaatatgagttttattgtccgtttacttgtttcagagtttgtattgtgattatcaattaccacaccatctcccatgaagaaagggaacggtgaagtactaagcgctagaggaagcagccaagtcggttagtggaagcatgattggtgcccagttagcctctgcaggatgtggaaacctccttccaggggaggttcagtgaattgtgtaggagaggttgtctgtggccagaatttaaacctatactcactttcccaaattgaatcactgctcacactgctgatgatttagagtgctgtccggtggagatcccacccgaacgtcttatctaatcatgaaactccctagttccttcatgtaacttccctgaaaaatctaagtgtttcataaatttgagagtctgtgacccacttaccttgcatctcacaggtagacagtatataactaacaaccaaagactacatattgtcactgacacacacgttataatcatttatcatatatatacatacatgcatacactctcaaagcaaataatttttcacttcaaaacagtattgacttgtataccttgtaatttgaaatattttctttgttaaaatagaatggtatcaataaatagaccattaatcag

SEQ ID NO: 1901 - protein, 149 aa, Homo sapiens
MASSDIQVKELEKRASGQAFELILSPRSKESVPEFPLSPPKKKDLSLEEIQKKLEAAEERRKSHEAEVLKQLAEKREHEKEVLQKAIEENNNFSKMAEEKLTHKMEANKENREAQMAAKLERLREKDKHIEEVRKNKESKDPADETEAD

SEQ ID NO: 1902 - protein, 276 aa, Homo sapiens
MSKPVDHVKRPMNAFMVWSRAQRRKMAQENPKMHNSEISKRLGAEWKLLTESEKRPFIDEAKRLRAMHMKEHPDYKYRPRRKPKTLLKKDKFAFPVPYGLGGVADAEHPALKAGAGLHAGAGGGLVPESLLANPEKAAAAAAAAAARVFFPQSAAAAAAAAAAAAAGSPYSLLDLGSKMAEISSSSSGLPYASSLGYPTAGAGAFHGAAAAAAAAAAAAGGHTHSHPSPGNPGYMIPCNCSAWPSPGLQPPLAYILLPGMGKPQLDPYPAAYAAAL

SEQ ID NO: 1903 - protein, 2209 aa, Homo sapiens
MWNDIELLTNDDTGSGYLSVGSRKEHGTALYQVDLLVKISSEKASLNPKIQACSLSDGFIIVADQSVILLDSICRSLQLHLVFDTEVDVVGLCQEGKFLLVGERSGNLHLIHVTSKQTLLTNAFVQKANDENRRTYQNLVIEKDGSNEGTYYMLLLTYSGFFCITNLQLLKIQQAIENVDFSTAKKLQGQIKSSFISTENYHTLGCLSLVAGDLASEVPVIIGGTGNCAFSKWEPDSSKKGMTVKNLIDAEIIKGAKKFQLIDNLLFVLDTDNVLSLWDIYTLTPVWNWPSLHVEEFLLTTEADSPSSVTWQGITNLKLIALTASANKKMKNLMVYSLPTMEILYSLEVSSVSSLVQTGISTDTIYLLEGVCKNDPKLSEDSVSVLVLRCLTEALPENRLSRLLHKHRFAEAESFAIQFGLDVELVYKVKSNHILEKLALSSVDASEQTEWQQLVDDAKENLHKIQDDEFVVNYCLKAQWITYETTQEMLNYAKTRLLKKEDKTALIYSDGLKEVLRAHAKLTTFYGAFGPEKFSGSSWIEFLNNEDDLKDIFLQLKEGNLVCAQYLWLRHRANFESRFDVKMLESLLNSMSASVSLQKLCPWFKNDVIPFVRRTVPEGQIILAKWLEQAARNLELTDKANWPENGLQLAEIFFTAEKTDELGLASSWHWISLKDYQNTEEVCQLRTLVNNLRELITLHRKYNCKLALSDFEKENTTTIVFRMFDKVLAPELIPSILEKFIRVYMREHDLQEEELLLLYIEDLLNRCSSKSTSLFETAWEAKAMAVIACLSDTDLIFDAVLKIMYAAVVPWSAAVEQLVKQHLEMDHPKVKLLQESYKLMEMKKLLRGYGIREVNLLNKEIMRVVRYILKQDVPSSLEDALKVAQAFMLSDDEIYSLRIIDLIDREQGEDCLLLLKSLPPAEAEKTAERVIIWARLALQEEPDHSKEGKAWRMSVAKTSVDILKILCDIQKDNLQKKDECEEMLKLFKEVASLQENFEVFLSFEDYSNSSLVADLREQHIKAHEVAQAKHKPGSTPEPIAAEVRSPSMESKLHRQALALQMSKQELEAELTLRALKDGNIKTALKKCSDLFKYHCNADTGKLLFLTCQKLCQMLADNVPVTVPVGLNLPSMIHDLASQAATICSPDFLLDALELCKHTLMAVELSRQCQMDDCGILMKASFGTHKDPYEEWSYSDFFSEDGIVLESQMVLPVIYELISSLVPLAESKRYPLESTSLPYCSLNEGDGLVLPVINSISALLQNLQESSQWELALRFVVGSFGTCLQHSVSNFMNATLSEKLFGETTLVKSRHVVMELKEKAVIFIRENATTLLHKVFNCRLVDLDLALGYCTLLPQKDVFENLWKLIDKAWQNYDKILAISLVGSELASLYQEIEMGLKFRELSTDAQWGIRLGKLGISFQPVFRQHFLTKKDLIKALVENIDMDTSLILEYCSTFQLDCDAVLQLFIETLLHNTNAGQGQGDASMDSAKRRHPKLLAKALEMVPLLTSTKDLVISLSGILHKLDPYDYEMIEVVLKVIERADEKITNININQALSILKHLKSYRRISPPVDLEYQYMLEHVITLPSAAQTRLPFHLIFFGTAQNFWKILSTELSEESFPTLLLISKLMKFSLDTLYVSTAKHVFEKKLKPKLLKLTQAKSSTLINKEITKITQTIESCLLSIVNPEWAVAIAISLAQDIPEGSFKISALKFCLYLAERWLQNIPSQDEKREKAEALLKKLHIQYRRSGTEAVLIAHKLNTEEYLRVIGKPAHLIVSLYEHPSINQRIQNSSGTDYPDIHAAAKEIAEVNEINLEKVWDMLLEKWLCPSTKPGEKPSELFELQEDEALRRVQYLLLSRPIDYSSRMLFVFATSTTTTLGMHQLTFAHRTRALQCLFYLADKETIESLFKKPIEEVKSYLRCITFLASFETLNIPITYELFCSSPKEGMIKGLWKNHSHESMAVRLVTELCLEYKIYDLQLWNGLLQKLLGFNMIPYLRKVLKAISSIHSLWQVPYFSKAWQRVIQIPLLSASCPLSPDQLSDCSESLIAVLECPVSGDLDLIGVARQYIQLELPAFALACLMLMPHSEKRHQQIKNFLGSCDPQVILKQLEEHMNTGQLAGFSHQIRSLILNNIINKKEFGILAKTKYFQMLKMHAMNTNNITELVNYLANDLSLDEASVLITEYSKHCGKPVPPDTAPCEILKMFLSGLS

SEQ ID NO: 1904 - protein, 197 aa, Homo sapiens
MQRASRLKRELHMLATEPPPGITCWQDKDQMDDLRAQILGGANTPYEKGVFKLEVIIPERYPFEPPQIRFLTPIYHPNIDSAGRICLDVLKLPPKGAWRPSLNIATVLTSIQLLMSEPNPDDPLMADISSEFKYNKPAFLKNARQWTEKHARQKQKADEEEMLDNLPEAGDSRVHNSTQKRKASQLVGIEKKFHPDV

SEQ ID NO: 1905 - protein, 202 aa, Homo sapiens
MATLIYVDKENGEPGTRVVAKDGLKLGSGPSIKALDGRSQVSTPRFGKTFDAPPALPKATRKALGTVNRATEKSVKTKGPLKQKQPSFSAKKMTEKTVKAKSSVPASDDAYPEIEKFFPFNPLDFESFDLPEEHQIAHLPLSGVPLMILDEERELEKLFQLGPPSPVKMPSPPWESNLLQSPSSILSTLDVELPPVCCDIDI

SEQ ID NO: 1906 - protein, 464 aa, Homo sapiens
METLSFPRYNIAEIVVHIRNKLLTGADGKNLSKSDFLPNPKPEVLYMIYMRALQLVYGVRLEHFYMMPVNIEVMYPHIMEGFLPVSNLFFHLDSFMPICRVNDFEIADILYPKANRTSRFLSGIINFIHFRETCLEKYEEFLLQNKSSVDKIQQLSNAHQEALMKLEKLNSVPVEEQEEFKQLKDDIQELQHLLNQDFRQKTTLLQERYTKMKSDFSEKTKHVNELKLSVVSLKEVQDSLKSKIVDSPEKLKNYKEKMKDTVQKLRSAREEVMEKYDIYRDSVDCLPSCQLEVQLYQKKSQDLADNREKLSSILKESLNLEGQIDSDSSELKKLKTEENSLIRLMTLKKERLATMQFKINKKQEDVKQYKRTMIEDCNKVQEKRDAVCEQVTAINQDIHKIKSGIQQLRDAEKREKLKSQEILVDLKSALEKYHEGIEKTTEECCTRIGGKTAELKRRMFKMPP

SEQ ID NO: 1907 - protein, 168 aa, Homo sapiens
MAEPWGNELASAAARGDLEQLTSLLQNNVNVNAQNGFGRTALQVMKLGNPEIARRLLLRGANPDLKDRTGFAVIHDAARAGFLDTLQTLLEFQADVNIEDNEGNLPLHLAAKEGHLRVVEFLVKHTASNVGHRNHKGDTACDLARLYGRNEVVSLMQANGAGGATNLQ

SEQ ID NO: 1908 - protein, 156 aa, Homo sapiens
MEPAAGSSMEPSADWLATAAARGRVEEVRALLEAGALPNAPNSYGRRPIQVMMMGSARVAELLLLHGAEPNCADPATLTRPVHDAAREGFLDTLVVLHRAGARLDVRDAWGRLPVDLAEELGHRDVARYLRAAAGGTRGSNHARIDAAEGPSDIPD

SEQ ID NO: 1909 - protein, 125 aa, Homo sapiens
MKKSGVLFLLGIILLVLIGVQGTPVVRKGRCSCISTNQGTIHLQSLKDLKQFAPSPSCEKIEIIATLKNGVQTCLNPDSADVKELIKKWEKQVSQKKKQKNGKKHQKKKVLKVRKSQRSRQKKTT

SEQ ID NO: 1910 - DNA, 931 bp, Homo sapiens
  misc_feature (1)...(931): n = A,T,C or G
caacagtcagaggtcgcgcaggcgctggtaccccgttggtccgcgcgttgctgcgttgtgaggggtgtcagctcagtgcatcccaggcagctcttagtgtggagcagtgaactgtgtgtggttccttctacttggggatcatgcagagagcttcrcgtctgaagagagagctgcacatgttagccacagagccacccccaggcatcacatgttggcaagataaagaccaaatggatgacctgcgagctcaaatattaggtggagccaacacaccttatgagaaaggtgtttttaagctagaagttatcattcctgagaggtacccatttgaacctcctcagatccgatttctcactccaatttatcatccaaacattgattctgctggaaggatttgtctggatgttctcaaattgccaccaaaaggtgcttggagaccatccctcaacatcgcaactgtgttgacctctattcagctgctcatgtcagaacccaaccctgatgacccgctcatggctgacatatcctcagaatttaaatataataagccagccttcctcaagaatgccagacagtggacagagaagcatgcaagacagaaacaaaaggctgatgaggaagagatgcttgataatctaccagaggctggtgactccagagtacacaactcaacacagaaaaggaaggccagtcagctagtaggcatagaaaagaaatttcatcctgatgtttaggggacttgtcctggttcatcttagttaatgtgttctttgccaaggtgatctaagttgcctaccttgaatttttttttaaatatatttgatgacataatttttgtgtagtttatttatcttgtacatatgtattttgaaatcttttaaacctgaaaaataaatagtcatttaatgttgaaaaaaaaaaaaaaaaaaaa

SEQ ID NO: 1911 - DNA, 27 bp, Artificial Sequence
  Primer
gctaaaggtgaccccaagaaaccaaag

SEQ ID NO: 1912 - DNA, 37 bp, Artificial Sequence; identical to SEQ ID NO: 1666
  Primer

SEQ ID NO: 1913 - protein, 207 aa, Homo sapiens; identical to SEQ ID NO: 1667

SEQ ID NO: 1914 - DNA, 624 bp, Homo sapiens
atgcagcatcaccaccatcaccacgctaaaggtgaccccaagaaaccaaagggcaagatgtccgcttatgccttctttgtgcagacatgcagagaagaacataagaagaaaaacccagaggtccctgtcaattttgcggaattttccaagaagtgctctgagaggtggaagacgatgtccgggaaagagaaatctaaatttgatgaaatggcaaaggcagataaagtgcgctatgatcgggaaatgaaggattatggaccagctaagggaggcaagaagaagaaggatcctaatgctcccaaaaggccaccgtctggattcttcctgttctgttcagaattccgccccaagatcaaatccacaaaccccggcatctctattggagacgtggcaaaaaagctgggtgagatgtggaataatttaaatgacagtgaaaagcagccttacatcactaaggcggcaaagctgaaggagaagtatgagaaggatgttgctgactataagtcgaaaggaaagtttgatggtgcaaagggtccagctaaagttgcccggaaaaaggtggaagaggaagatgaagaagaggaggaggaagaagaggaggaggaggaggaggaggatgaataa

SEQ ID NO: 1915 - DNA, 28 bp, Artificial Sequence
  Primer
gtgacgatggaggagctgcgggagatgg

SEQ ID NO: 1916 - DNA, 30 bp, Artificial Sequence
  Primer
cgcctaactcgagtcactaacagctgggag

SEQ ID NO: 1917 - protein, 401 aa, Homo sapiens
MQHHHHHHVTMEELREMDCSVLKRLMNRDENGGGAGGSGSHGTLGLPSGGKCLLLDCRPFLAHSAGYILGSVNVRCNTIVRRRAKGSVSLEQILPAEEEVRARLRSGLYSAVIVYDERSPRAESLREDSTVSLVVQALRRNAERTDICLLKGGYERFSSEYPEFCSKTKALAAIPPPVPPSATEPLDLGCSSCGTPLHDQGGPVEILPFLYLGSAYHAARRDMLDALGITALLNVSSDCPNHFEGHYQYKCIPVEDNHKADISSWFMEAIEYIDAVKDCRGRVLVHCQAGISRSATICLAYLMMKKRVRLEEAFEFVKQRRSIISPNFSFMGQLLQFESQVLATSCAAEAASPSGPLRERGKTPATPTSQFVFSFPVSVGVHSAPSSLPYLHSPITTSPSC

SEQ ID NO: 1918 - DNA, 1209 bp, Homo sapiens
atgcagcatcaccaccatcaccacgtgacgatggaggagctgcgggagatggactgcagtgtgctcaaaaggctgatgaaccgggacgagaatggcggcggcgcgggcggcagcggcagccacggcaccctggggctgccgagcggcggcaagtgcctgctgctggactgcagaccgttcctggcgcacagcgcgggctacatcctaggttcggtcaacgtgcgctgtaacaccatcgtgcggcggcgggctaagggctccgtgagcctggagcagatcctgcccgccgaggaggaggtacgcgcccgcttgcgctccggcctctactcggcggtcatcgtctacgacgagcgcagcccgcgcgccgagagcctccgcgaggacagcaccgtgtcgctggtggtgcaggcgctgcgccgcaacgccgagcgcaccgacatctgcctgctcaaaggcggctatgagaggttttcctccgagtacccagaattctgttctaaaaccaaggccctggcagccatcccacccccggttccccccagtgccacagagcccttggacctgggctgcagctcctgtgggaccccactacacgaccaggggggtcctgtggagatccttcccttcctctacctcggcagtgcctaccatgctgcccggagagacatgctggacgccctgggcatcacggctctgttgaatgtctcctcggactgcccaaaccactttgaaggacactatcagtacaagtgcatcccagtggaagataaccacaaggccgacatcagctcctggttcatggaagccatagagtacatcgatgccgtgaaggactgccgtgggcgcgtgctggtgcactgccaggcgggcatctcgcggtcggccaccatctgcctggcctacctgatgatgaagaaacgggtgaggctggaggaggccttcgagttcgttaagcagcgccgcagcatcatctcgcccaacttcagcttcatggggcagctgctgcagttcgagtcccaggtgctggccacgtcctgtgctgcggaggctgctagcccctcgggacccctgcgggagcggggcaagacccccgccacccccacctcgcagttcgtcttcagctttccggtctccgtgggcgtgcactcggcccccagcagcctgccctacctgcacagccccatcaccacctctcccagctgttagtga

SEQ ID NO: 1919 - DNA, 23 bp, Artificial Sequence
  Primer
cggtgccacgcccatggaccttc

SEQ ID NO: 1920 - DNA, 35 bp, Artificial Sequence
  Primer
ctgagaattcattaaacttgtggttgctcttcacc

SEQ ID NO: 1921 - protein, 167 aa, Homo sapiens [sequence omitted]

SEQ ID NO: 1922 - DNA, 507 bp, Homo sapiens
atgcagcatcaccaccatcaccaccggtgccacgcccatggaccttcttgtctcgtcacggccataactagggaggaaggagggccgaggagtggaggggctcaggcgaagctggggtgctgttgggggtatccgagtcccagaagcacctggaaccccgacagaagattctggactccccagacgggaccaggagagggacggcatgagcgacacacacaaacacagaaccacacagccagtcccaggagcccagtaatggagagccccaaaaagaagaaccagcagctgaaagtcgggatcctacacctgggcagcagacagaagaagatcaggatacagctgagatcccagtgcgcgacatggaaggtgatctgcaagagctgcatcagtcaaacaccggggataaatctggatttgggttccggcgtcaaggtgaagataatacctaaagaggaacactgtaaaatgccagaagcaggtgaagagcaaccacaagtttaatga

SEQ ID NO: 1923 - DNA, 3192 bp, Homo sapiens
cccacgcgtccggcggtcgccgcgggatttggagctgcctagcctcgcggtcgctttggcagcatgtaagcagctgtttgccaagaacccaggtcactgctaagaaagggtgccttcgggagaagagtgtccagaggataccaatgccagatgcatctggagttacactcagcactcgcagtatgagacattgtgtgccagcatctctttccttctggcaaagactgtagctctccaggtaggaggatcctggaagctgtgagcaccaggagccttgccagaggaggatggggccagatatgaactctctaccatgaacatggttctcggcttatgaaggaattttaagtaaaacagttatttaatttccacatattcaagtcaaaagccttctgtgtgaagtgccagtgattacccctccacaggagttatcaggatttttctggcaccaagtttaattcttcttcgtacttctggtagtgacagatctgcagggcagatttatctgttgaatgctcttgggcaggaaaaccatgtaaaacctctggaagcagcatcaggacagcagagcagagcccccgtcctcactgctcacttgcacagaaactccatctggactcggatgcttttactgaagacccatctagcttcaatcatctttagagtccatccattctggagagacctggcgtttgcagttgcctcctgtggccgtgtttttctgtcattctgttcccaggccttctattcaggcggttgaagggtgtggactttggaatggggtttgctgttcttcgggaacttgcttcctttccctggctggtgctgtcaggaaggaccatctgaaggctgcaatttgttcttagggaggcaggtgctggcctggcctggatcttccaccatgttcctgttgctgccttttgatagcctgattgtcaaccttctgggcatctccctgactgtcctcttcaccctccttctcgttttcatcatagtgccagccatttttggagtctcctttggtatccgcaaactctacatgaaaagtctgttaaaaatctttgcgtgggctaccttgagaatggagcgaggagccaaggagaagaaccaccagctttacaagccctacaccaacggaatcattgcaaaggatcccacttcactagaagaagagatcaaagagattcgtcgaagtggtagtagtaaggctctggacaacactccagagttcgagctctctgacattttctacttttgccggaaaggaatggagaccattatggatgatgaggtgacaaagagattctcagcagaagaactggagtcctggaacctgctgagcagaaccaattataacttccagtacatcagccttcggctcacggtcctgtgggggttaggagtgctgattcggtactgctttctgctgccgctcaggatagcactggctttcacagggattagccttctggtggtgggcacaactgtggtgggatacttgccaaatgggaggtttaaggagttcatgagtaaacatgttcacttaatgtgttaccggatctgcgtgcgagcgctgacagccatcatcacctaccatgacagggaaaacagaccaagaaatggtggcatctgtgtggccaatcatacctcaccgatcgatgtgatcatcttggccagcgatggctattatgccatggtgggtcaagtgcacgggggactcatgggtgtgattcagagagccatggtgaaggcctgcccacacgtctggtttgagcgctcggaagtgaaggatcgccacctggtggctaagagactgactgaacatgtgcaagataaaagcaagctgcctatcctcatcttcccagaaggaacctgcatcaataatacatcggtgatgatgttcaaaaagggaagttttgaaattggagccacagtttaccctgttgctatcaagtatgaccctcaatttggcgatgccttctggaacagcagcaaatacgggatggtgacgtacctgctgcgaatgatgaccagctgggccattgtctgcagcgtgtggtacctgcctcccatgactagagaggcagatgaagatgctgtccagtttgcgaatagggtgaaatctgccattgccaggcagggaggacttgtggacctgctgtgggatgggggcctgaagagggagaaggtgaaggacacgttcaaggaggagcagcagaagctgtacagcaagatgatcgtggggaaccacaaggacaggagccgctcctgagcctgcctccagctggctggggccaccgtgcggggtgccaacgggctcagagctggagttgccgccgccgcccccactgctgtgtcctttccagactccagggctccccgggctgctctggatcccaggactccggctttcgccgagccgcagcgggatccctgtgcacccggcgcagctacccttggtggtctaaacggatgctgctgggtgttgcgacccaggacgagatgccttgtttcttttacaataagtcgttggaggaatgccattaaagtgaactccccacctttgcacgctgtgcgggctgagtggttggggagatgtggccatggtcttgtgctagagatggcggtacaagagtctgttatgcaagcccgtgtgccagggatgtgctgggggcggccacccgctctccaggaaaggcacagctgaggcactgtggctggcttcggcctcaacatcgcccccagccttggagctctgcagacatgataggaaggaaactgtcatctgcaggggctttcagcaaaatgaagggttagatttttatgctgctgctgatggggttactaaagggaggggaagaggccaggtgggccgctgactgggccatggggagaacgtgtgttcgtactccaggctaaccctgaactccccatgtgatgcgcgctttgttgaatgtgtgtctcggtttccccatctgtaatatgagtcggggggaatggtggtgattcctacctcacagggctgttgtggggattaaagtgctgcgggtgagtgaaggacacatcacgttcagtgtttcaagtacaggcccacaaaacggggcacggcaggcctgagctcagagctgctgcactgggctttggatttgttcttgtgagtaaataaaactggctggtgaatgaaaaaaaaaa

SEQ ID NO: 1924 - DNA, 2048 bp, Homo sapiens
  misc_feature (1)...(2048): n = A,T,C or G
gccggaagcgcgcggagaccatgtagtgagaccctcgcgaggtctgagagtcactggagctaccagaagcatcatggggccctggggagagccagagctcctggtgtggcgccccgaggcggtagcttcagagcctccagtgcctgtggggctggaggtgaagttgggggccctggtgctgctgctggtgctcaccctcctctgcagccttggttccatcggtgtgctgcgccggacaggagctaatcatgaaggctcagcttcccgccagaaagccctgagcctagtaagctgtttcgcggggggcgtctttttggccacttgtctcctggacctgctgcctgactacctggctgccatagatgaggccctggcagccttgcacgtgacgctccagttcccactgcaagagttcatcctggccatgggcttcttcctggtcctggtgatggagcagatcacactggcttacaaggagcagtcagggccgtcacctctggaggaaacaagggctctgctgggaacagtgaatggtgggccgcagcattggcatgatgggccaggggtcccacaggcgagtggagccccagcaaccccctcagccttgcgtgcctgtgtactggtgttctccctggccctccactccgtgttcgaggggctggcggtagggctgcagcgagaccgggctcgggccatggagctgtgcctggctttgctgctccacaagggcatcctggctgtcagcctgtccctgcggctgttgcagagccaccttagggcacaggtngtggctggctgtgggatcctgttctcatgcatgacacctctaggcatcgggctgggtgcagctctggcagagtcggcaggacctctgcaccagctggcccagtctgtgctagagggcatggcagctggcacctttctctatatcacctttctggaaatcctgccccaggagctggccagttctgagcaaaggatcctcaaggtcattctgctcctagcaggctttgccctgctcactggcctgctcttcatccaaatctagggggcttcaagagaggggcaggggagattgatgatcaggtgcccctgttctcccttccctcccccagttgtggggaataggaaggaaaggggaagggaaatactgaggaccaaaaagttctctgggagctaaagatagagcctttggggctatctgactaatgagagggaagtgggcagacaagaggctggccccagtcccaaggaacaagagatggtcaagtcgctagagacatatcaggggacattaggattggggaagacacttgactgctagaatcagaggttggacactatacataaggacaggctcacatgggaggctggaggtgggtacccagctgctgtggaacgggtatggacaggtcataaacctagagtcagtgtcctgttggtcctdvgcccnatttcagcaccctgccacttggagtggacccctcctactcttcttagcgcctaccctcatacctatcntccctcctcccatctcctagggactggcgccaaatggtctctccctgccaattttggtatcttctctggcctctccagtcctgcttactcctctatttttaaagtgccaaacaaatccccttcctctttctcaaagcacagtaatgtggcactgagccctacccagcacctcagtgaagggggcctgcttgcctttttttttgttncccggatcctggggtggggcagaaatattttctgggctggggtaggaggaaggttgttagcatctactgctgccgtaccctaggaatatggggacatggacatggtgtcccatgcccagatgataaacactgagctgccaaaacatttttttaaatacacccgaggagcccaagggggaagggcaatgcctacccccagcgttatttttggggagggagggctgtgcatagggacatattctttagaatctattttattaactgacctgttttgggacctgttacccaaataaaagatgtttctagacaaaaaaaaaaaaa

SEQ ID NO: 1925 - protein, 456 aa, Homo sapiens
MFLLLPFDSLIVNLLGISLTVLFTLLLVFIIVPAIFGVSFGIRKLYMKSLLKIFAWATLRMERGAKEKNHQLYKPYTNGIIAKDPTSLEEEIKEIRRSGSSKALDNTPEFELSDIFYFCRKGMETIMDDEVTKRFSAEELESWNLLSRTNYNFQYISLRLTVLWGLGVLIRYCFLLPLRIALAFTGISLLVVGTTVVGYLPNGRFKEFMSKHVHLMCYRICVRALTAIITYHDRENRPRNGGICVANHTSPIDVIILASDGYYAMVGQVHGGLMGVIQRAMVKACPHVWFERSEVKDRHLVAKRLTEHVQDKSKLPILIFPEGTCINNTSVMMFKKGSFEIGATVYPVAIKYDPQFGDAFWNSSKYGMVTYLLRMMTSWAIVCSVWYLPPMTREADEDAVQFANRVKSAIARQGGLVDLLWDGGLKREKVKDTFKEEQQKLYSKMIVGNHKDRSRS

SEQ ID NO: 1926 - protein, 324 aa, Homo sapiens
MGPWGEPELLVWRPEAVASEPPVPVGLEVKLGALVLLLVLTLLCSLGSIGVLRRTGANHEGSASRQKALSLVSCFAGGVFLATCLLDLLPDYLAAIDEALAALHVTLQFPLQEFILAMGFFLVLVMEQITLAYKEQSGPSPLEETRALLGTVNGGPQHWHDGPGVPQASGAPATPSALRACVLVFSLALHSVFEGLAVGLQRDRARAMELCLALLLHKGILAVSLSLRLLQSHLRAQVVAGCGILFSCMTPLGIGLGAALAESAGPLHQLAQSVLEGMAAGTFLYITFLEILPQELASSEQRILKVILLLAGFALLTGLLFIQI

1. An isolated polynucleotide comprising a sequence selected from the group consisting of:
(a) sequences provided in SEQ ID NO:1865-1868, 1873, 1883, 1884-1890, 1910;
(b) complements of the sequences provided in SEQ ID NO: 1865-1868, 1873, 1883 and 1884-1890;
(c) sequences consisting of at least 20 contiguous residues of a sequence provided in SEQ ID NO:1865-1868, 1873, 1883 and 1884-1890;
(d) sequences that hybridize to a sequence provided in SEQ ID NO: 1865-1868, 1873, 1883 and 1884-1890, under moderately stringent conditions;
(e) sequences having at least 75% identity to a sequence of SEQ ID NO:1865-1868, 1873, 1883 and 1884-1890;
(f) sequences having at least 90% identity to a sequence of SEQ ID NO:1865-1868, 1873, 1883 and 1884-1890; and
(g) degenerate variants of a sequence provided in SEQ ID NO:1865-1868, 1873, 1883 and 1884-1890:

2. An isolated polypeptide comprising an amino acid sequence selected from the group consisting of:
(a) SEQ ID NO:1869-1872 and 1874;
(b) sequences encoded by a polynucleotide of claim 1;
(c) sequences having at least 70% identity to a sequence encoded by a polynucleotide of claim 1; and
(d) sequences having at least 90% identity to a sequence encoded by a polynucleotide of claim 1.

3. An expression vector comprising a polynucleotide of claim 1 operably linked to an expression control sequence.

4. A host cell transformed or transfected with an expression vector according to claim 3.

5. An isolated antibody, or antigen-binding fragment thereof, that specifically binds to a polypeptide of claim 2.

6. A method for detecting the presence of a cancer in a patient, comprising the steps of:
(a) obtaining a biological sample from the patient;
(b) contacting the biological sample with a binding agent that binds to a polypeptide of claim 2;
(c) detecting in the sample an amount of polypeptide that binds to the binding agent; and
(d) comparing the amount of polypeptide to a predetermined cut-off value and therefrom determining the presence of a cancer in the patient.

7. A fusion protein comprising at least one polypeptide according to claim 2.

8. An oligonucleotide that hybridizes to a sequence recited in SEQ ID NO:1865-1868, 1873, 1883 and 1884-1890 under moderately stringent conditions.

9. A method for stimulating and/or expanding T cells specific for a tumor protein, comprising contacting T cells with at least one component selected from the group consisting of:
(a) polypeptides according to claim 2;
(b) polynucleotides according to claim 1; and
(c) antigen-presenting cells that express a polypeptide according to claim 2,
under conditions and for a time sufficient to permit the stimulation and/or expansion of T cells.

10. An isolated T cell population, comprising T cells prepared according to the method of claim 9.

11. A composition comprising a first component selected from the group consisting of physiologically acceptable carriers and immunostimulants, and a second component selected from the group consisting of:
(a) polypeptides according to claim 2;
(b) polynucleotides according to claim 1;
(c) polynucleotides having a sequence as provided in SEQ ID NO:1910;
(d) antibodies according to claim 5;
(e) fusion proteins according to claim 7;
(f) T cell populations according to claim 10; and
(g) antigen presenting cells that express a polypeptide according to claim 2.

12. A method for stimulating an immune response in a patient, comprising administering to the patient a composition of claim 11.

13. A method for the treatment of a cancer in a patient, comprising administering to the patient a composition of claim 11.

14. A method for determining the presence of a cancer in a patient, comprising the steps of:
(a) obtaining a biological sample from the patient;
(b) contacting the biological sample with an oligonucleotide according to claim 8;
(c) detecting in the sample an amount of a polynucleotide that hybridizes to the oligonucleotide; and
(d) compare the amount of polynucleotide that hybridizes to the oligonucleotide to a predetermined cut-off value, and therefrom determining the presence of the cancer in the patient.

15. A diagnostic kit comprising at least one oligonucleotide according to claim 8.

16. A diagnostic kit comprising at least one antibody according to claim 5 and a detection reagent, wherein the detection reagent comprises a reporter group.

17. A method for inhibiting the development of a cancer in a patient, comprising the steps of:
(a) incubating CD4⁺ and/or CD8⁺ T cells isolated from a patient with at least one component selected from the group consisting of: (i) polypeptides according to claim 2; (ii) polynucleotides according to claim 1; and (iii) antigen presenting cells that express a polypeptide of claim 2, such that T cell proliferate;
(b) administering to the patient an effective amount of the proliferated T cells,
and thereby inhibiting the development of a cancer in the patient.

18. The fusion protein of claim 7, wherein the fusion protein comprises a sequence selected from the group consisting of SEQ ID NO:1876, 1878, 1913, 1917 and 1921.
